(19) United States
(12) Patent Application Publication
(10) Pub. No.: US 2012/0288918 A1
(43) Pub. Date: Nov. 15, 2012

(54) SALT TOLERANT ORGANISMS

(75) Inventors: Shane Edward Hopkins, San Diego, CA (US); Tanya Joy Shin, San Diego, CA (US); Melisa C. Low, San Diego, CA (US); Yan Poon, San Diego, CA (US); Alvin Aram Cho, San Diego, CA (US)

(73) Assignee: Sapphire Energy, Inc., San Diego, CA (US)

(21) Appl. No.: 13/496,017

(22) PCT Filed: Sep. 15, 2010
(86) PCT No.: PCT/US10/48991

§ 371 Date: May 18, 2012

Related U.S. Application Data
(60) Provisional application No. 61/242,574, filed on Sep. 15, 2009.

(51) Int. Cl. C12N 1/13

(52) U.S. Cl. 435/257.2

(57) ABSTRACT

Disclosed herein are transformed non-vascular photosynthetic organisms that are salt tolerant, nucleotides and vectors useful in conducting such transformations, and transformed strains produced by such transformations.

### CROSS REFERENCE TO RELATED APPLICATION

[0001] This application claims the benefit of United States Provisional Application No. 61/242,574, filed Sep. 15, 2009, the entire contents of which are incorporated by reference for all purposes. This application also claims the benefit of U.S. Provisional Application No. 61/301,735, filed Feb. 5, 2010, the entire contents of which are incorporated by reference for all purposes.

### INCORPORATION BY REFERENCE

[0002] All publications, patents, and patent applications mentioned in this specification are herein incorporated by reference to the same extent as if each individual publication, parent, or patent application was specifically and individually indicated to be incorporated by reference.

### BACKGROUND

[0003] Algae are highly adaptable plants that are capable of rapid growth under a wide range of conditions. As photosynthetic organisms, they have the capacity to transform sunlight into energy that can be used to synthesize a variety of biomolecules for use as industrial enzymes, therapeutic compounds and proteins, nutritional, commercial, or fuel products, etc.

[0004] The majority of algal species are adapted to growth in an aqueous environment, and are easily grown in liquid media using light as an energy source. The ability to grow algae on a large scale in an outdoor setting, in ponds or other open or closed containers, using sunlight for photosynthesis, enhances their utility for bioproduction, environmental remediation, and carbon fixation.

### SUMMARY

[0005] Provided herein is a non-vascular photosynthetic organism comprising at least one mutation in any one of SEQ ID NO. 115, SEQ ID NO. 116, SEQ ID NO. 122, SEQ ID NO. 201, SEQ ID NO. 129, SEQ ID NO. 202, SEQ ID NO. 206. SEQ ID NO. 133, SEQ ID NO. 198, SEQ ID NO. 200, SEQ ID NO. 204, SEQ ID NO. 203, SEQ ID NO. 135, SEQ ID NO. 134, SEQ ID NO. 166, SEQ ID NO. 162, SEQ ID NO. 169, SEQ ID NO. 168, SEQ ID NO. 170, SEQ ID NO. 175, SEQ ID NO. 127, SEQ ID NO. 230, SEQ ID NO. 231, SEQ ID NO. 233 and SEQ ID NO. 234 or a sequence having at least 95% sequence identity to any of the preceding sequences, wherein the at least one mutation comprises one or more nucleotide additions, deletions and/or substitutions and the organism has an increased growth rate in an aqueous environment containing between about 75 mM and 275 mM sodium chloride as compared to the same organism without the at least one mutation.

[0006] The at least one mutation can be in a coding region where it may result in one or more amino acid additions, deletions and/or substitutions. The one or more mutations can also be in regulatory regions such as a 5′ UTR region or a 3′ UTR region. In one embodiment the at least one mutation is located in a promoter region.

[0007] In one embodiment, the activity of a protein encoded by any one of SEQ ID NO. 115, SEQ ID NO. 116, SEQ ID NO. 122, SEQ ID NO. 201, SEQ ID NO. 129, SEQ ID NO. 202, SEQ ID NO. 206, SEQ ID NO. 133, SEQ ID NO. 198, SEQ ID NO. 200, SEQ ID NO. 204, SEQ ID NO. 203, SEQ ID NO. 135, SEQ ID NO. 134, SEQ ID NO. 166, SEQ ID NO. 162, SEQ ID NO. 169, SEQ ID NO. 168, SEQ ID NO. 170, SEQ ID NO. 175, SEQ ID NO. 127, SEQ ID NO. 230, SEQ ID NO. 231, SEQ ID NO. 233 and SEQ ID NO. 234 or a protein having at least 95% amino acid sequence identity to a protein encoded by any of the preceding sequences is decreased by the presence of the at least one mutation as compared to the protein without the at least one mutation. The activity of the protein may be decreased by at least 10%, at least 20%, at least 30%, at least 40%, at least 50%, at least 60%, at least 70%, at least 80%, at least 90% or 100% (i.e. inactive).

[0008] In other embodiments, the organism with the at least one mutation has a growth rate that is at least 10%, at least 20%, at least 30%, at least 40%, at least 50%, at least 60%, at least 70%, at least 80%, at least 90%, at least 100%, at least 125%, at least 150%, at least 175%, at least 200%, at least 225%, at least 250%, at least 275%, at least 300%, at least 325%, at least 350%, at least 375%, at least 400%, at least 425%, at least 450%, at least 475% or at least 500% greater than the organism without the at least one mutation.

[0009] In further embodiments, the presence of the at least one mutation results in a transcription rate of any of the preceding nucleotide sequences that is decreased by at least 10%, at least 20%, at least 30%, at least 40%, at least 50%, at least 60%, at least 70%, at least 80%, at least 90% or 100% (no detectable transcripts) as compared to transcription in the same organism without the at least one mutation. In other embodiments, the presence of the at least one mutation results in a decrease in the translation of a protein encoded by any of the preceding nucleotide sequences by at least 10%, at least 20%, at least 30%, at least 40%, at least 50%, at least 60%, at least 70%, at least 80%, at least 90% or 100% (no detectable translation) as compared to translation in the same organism without the at least one mutation.

[0010] Another embodiment provides at genetically modified non-vascular photosynthetic organism comprising at least one RNAi agent comprising an antisense nucleotide sequence that is complementary to mRNA transcribed from any one of SEQ ID NO. 115, SEQ ID NO. 116, SEQ ID NO. 122, SEQ ID NO. 201, SEQ ID NO. 129, SEQ ID NO. 202, SEQ ID NO. 206, SEQ ID NO. 133, SEQ ID NO. 198, SEQ ID NO. 200, SEQ ID NO. 204, SEQ ID NO. 203, SEQ ID NO. 135, SEQ ID NO. 134, SEQ ID NO. 166, SEQ ID NO. 162, SEQ ID NO. 169, SEQ ID NO. 168, SEQ ID NO. 170, SEQ ID NO. 175, SEQ ID NO. 27, SEQ ID NO. 230, SEQ ID NO. 231, SEQ ID NO. 233 and SEQ ID NO. 234 or a sequence having at least 95% sequence identity to any of the preceding sequences and in which the organism has an increased growth rate in an aqueous environment containing between about 75 mM and 275 mM sodium chloride as compared to the organism not modified with the at least one RNAi agent. In certain embodiments, the at least one RNAi agent is a microRNA (miRNA) or a small interfering RNA (siRNA).

[0011] In one embodiment the activity of a protein encoded by any one of SEQ ID NO. 115, SEQ ID NO. 116, SEQ ID NO. 122, SEQ ID NO. 201, SEQ ID NO. 129, SEQ ID NO. 202, SEQ ID NO. 206, SEQ ID NO. 133, SEQ ID NO. 198, SEQ ID NO. 200, SEQ ID NO. 204, SEQ ID NO. 203, SEQ ID NO. 135, SEQ ID NO. 134, SEQ ID NO. 166, SEQ ID NO. 162, SEQ ID NO. 169, SEQ ID NO. 168, SEQ ID NO. 170, SEQ ID NO. 175, SEQ ID NO. 127, SEQ ID NO. 230, SEQ ID NO. 231, SEQ ID NO. 233 and SEQ ID NO. 234 or a protein having at least 95% amino acid sequence identity to a protein encoded by any one of the preceding sequences is decreased as compared to the protein in the same organism which is not modified with the at least one RNAi agent. In certain embodiments, the activity of the protein is decreased by at least 10%, at least 20%, at least 30%, at least 40%, at least 50%, at least 60%, at least 70%, at least 80%, at least 90% or 100% (i.e. inactive).

[0012] In additional embodiments, the growth rate of the organism is at least 10%, at least 20%, at least 30%, at least 40%, at least 50%, at least 60%, at least 70%, at least 80%, at least 90%, at least 100%, at least 125%, at least 150%, at least 175%, at least 200%, at least 225%, at least 250%, at least 275%, at least 300%, at least 325%, at least 350%, at least 375%, at least 400%, at least 425%, at least 450%, at least 475% or at least 500% greater than the same organism not modified with the at least one RNAi agent.

[0013] In further embodiments, the presence of full length transcripts of any of the preceding nucleotide sequences is decreased by at least 10%, at least 20%, at least 30%, at least 40%, at least 50%, at least 60%, at least 70%, at least 80%, at least 90% or 100% (no detectable full length transcripts) as compared to the same organism not modified with the at least one RNAi agent. In other embodiments, the presence of a protein encoded by any of the preceding sequences or a protein having at least 95% amino acid sequence identity to a protein encoded by any of the preceding nucleotide sequences is decreased by at least 10%, at least 20%, at least 30%, at least 40%, at least 50%, at least 60%, at least 70%, at least 80%, at least 90% or 100% (no detectable protein) as compared to the same organism not modified with the at least one RNAi agent.

[0014] In any of the above embodiments the non-vascular photosynthetic organism may be a cyanobacterium or an alga. The alga can be a microalga or a macroalga. Non-limiting examples of microalgal species include Chlamydomonas sp. Volvacales sp, Dunaliella sp, Scenedesmus sp, Chorella sp, Hematococcus sp., Volvox sp, or Nannochloropsis sp. Particular examples of microalgae include, but are not limited to, C. reinhardtii, N. oceanica, N. salina, D. salina, H. pluvalis, S. dimorphus, D. viridis, N. salina, N. oculata or D. tertiolecta.

[0015] In any of the preceding embodiments, the concentration of sodium chloride in the aqueous environment is between about 250 mM and 100 mM, between about 200 mM and 100 mM, between about 175 mM and 75 mM, between about 150 mM and 75 mM, between about 275 mM and 100 mM, between about 275 mM and 150 mM or between about 275 mM and 200 mM.

[0016] Presented herein are non-vascular photosynthetic organisms, for example, algae that are engineered to be salt tolerance.

[0017] A salt tolerant alga as disclosed herein is transformed “knocking down” or “knocking out” one or more polynucleotides that encode one or more proteins (see “Nucleic Acid and Amino Acid Sequences”). Algae that include one or more knock out or knock down genes that confer salt tolerance can be grown in concentrations of salt that can deter the growth of other algae and, in some embodiments, other non-algal organisms. Also provided are algae transformed with a polynucleotide that encodes a protein that is toxic to one or more animal species, such as a gene encoding a Bt toxin that is lethal to insects.

[0018] Algae with one or more polynucleotides are knocked out or knocked down to prove resistance to salt are in some embodiments grown on a large scale in the presence of high concentrations of salt for the production of biomolecules, such as, for example, therapeutic proteins, industrial enzymes, nutritional molecules, commercial products, or fuel products. Algae transformed with one or more toxin genes that are lethal to one or more insect species can also be grown in large scale for production of therapeutic, nutritional, fuel, or commercial products. Algae bioengineered for salt tolerance and/or to express insect toxins can also be grown in large scale cultures for decontamination of compounds, environmental remediation, or carbon fixation.

[0019] Provided in some embodiments herein is a salt tolerant prokaryotic alga transformed to knock out or knock down a polynucleotide encoding a protein that confers salt sensitivity. In some embodiments, the alga is a cyanobacteria species.

[0020] In some embodiments, the host alga transformed is a eukaryotic alga. In some embodiments, the host alga is a species of the Chlorophyta. In some embodiments, the alga is a microalga. In some instances, the microalga is a Chlamydomonas species. A transformed alga having salt tolerance by inactivation of a gene in the chloroplast genome is in some embodiments homoplastic for the inactivation.

[0021] In another embodiment, provided herein is a salt tolerant non-chlorophyll c-containing eukaryotic alga, comprising an exogenous polynucleotide integrated into the nuclear genome, wherein the exogenous polynucleotide comprises a sequence that encodes a protein that confers resistance to an herbicide, wherein resistance to the herbicide is conferred by a single exogenous protein.

[0022] In another embodiment, provided herein is a non-chlorophyll c-containing eukaryotic alga, comprising a knockout or a knockdown of a polynucleotide in the nuclear genome, wherein the absence or inhibition of the product of the polynucleotide confers resistance to salt.

[0023] Also provided herein is a salt tolerant non-chlorophyll c-containing eukaryotic alga, comprising a recombinant polynucleotide integrated into the nuclear genome, in which the recombinant polynucleotide encodes an endogenous or exogenous EPSPS protein that confers resistance to glyphosate.

[0024] Also provided are nucleic acid constructs for transforming algae with one or more nucleotide sequences that knock out or knock down genes in order to confer salt tolerance.

[0025] The disclosure further provides an alga comprising a recombinant polynucleotide that encodes a Bacillus thuringiensis (Bt) toxin protein. In one embodiment, the alga includes a cry gene encoding the Bt toxin. The exogenous Bt toxin gene can be incorporated in to the nuclear genome or the chloroplast genome of the alga. Introduction of a exogenous Bt toxin gene can interrupt and inactive nucleotides that encode a proteins conferring sensitivity to salt, thus making the alga salt tolerance.

[0026] The disclosure further provides a salt tolerant eukaryotic alga comprising one or more recombinant polynucleotide sequences encoding proteins that confer resistance to herbicides, in which each of the proteins confers resistance to a different herbicide. In one embodiment, at least one of the polynucleotide sequences encoding a protein conferring herbicide resistance is integrated into the chloroplast genome of a eukaryotic alga. In one embodiment, at least one of the polynucleotide sequences encoding a protein conferring herbicide resistance is integrated into the nuclear genome of a eukaryotic alga. In a further embodiment, at least a first of the two or more polynucleotide sequences encoding a protein conferring herbicide resistance is integrated into the chloroplast genome and at least a second of the two or more polynucleotide sequences encoding a protein conferring herbicide resistance is integrated into the nuclear genome of a eukaryotic alga.

[0027] Also provided herein is a non chlorophyll c-containing salt tolerant alga comprising a polynucleotide encoding a protein that confers resistance to an herbicide and an exogenous polynucleotide encoding a protein that does not confer resistance to an herbicide, wherein the protein that does not confer resistance to a herbicide is an industrial enzyme or therapeutic protein, or a protein that participates in or promotes the synthesis of at least one nutritional, therapeutic, commercial, or fuel product, or a protein that facilitates the isolation of at least one nutritional, therapeutic, commercial, or fuel product.

[0028] Also disclosed herein are methods of producing one or more biomolecules, in which the methods include transforming an alga by knocking out or knocking down one or more polynucleotides resulting in salt tolerance, growing the alga in the presence of high salt concentrations, and harvesting one or more biomolecules from the alga or algal media. The methods in some embodiments include isolating the one or more biomolecules.

[0029] In some embodiments, algae are further transformed with at least one herbicide resistance gene and at least one toxin gene, and are grown in the presence of at least one herbicide under conditions in which the toxin is expressed, and one or more biomolecules is harvested from the alga or algal media.

[0030] Also disclosed herein are methods of producing a biomass-degrading enzyme in an alga, in which the methods include: 1) transforming the alga by knocking out or knocking down one or more polynucleotides and so conferring salt tolerance to the alga, and a sequence encoding an exogenous biomass-degrading enzyme which promotes increased expression of an endogenous biomass-degrading enzyme; and 2) growing the alga in the presence of high salt concentrations and under conditions which allow for production of the biomass-degrading enzyme, in which the salt is in sufficient concentration to inhibit growth of the alga, which does not include the knock out or knock down conferring salt tolerance, to producing the biomass-degrading enzyme. The methods in some embodiments include isolating the biomass-degrading enzyme.

### BRIEF DESCRIPTION OF THE DRAWINGS

[0031] These and other features, aspects, and advantages of the present disclosure will become better understood with regard to the following description, appended claims and accompanying figures where:

[0032] FIG. 1 shows an exemplary vector, SENuc391 used in the transformation of the nuclear genome of Chlamydomonas reinhardtii to express an artificial miRNA. The hygromycin resistance gene is indicated by “Aph 7”. It is preceded by the C. reinhardtii Beta2-tubulin promoter and followed by the C. reinhardtii rbcS2 terminator. The first intron from the C. reinhardtii rbcS2 gene was inserted within Aph 7″ to increase expression levels and consequentially, the number of transformants. The paromomycin resistance gene is indicated by “Aph VIII”. It is preceded by the (C. reinhardtii psaD promoter and followed by the C. reinhardtii psaD terminator. The segment labeled “Hybrid Promoter” which consists of a fused promoter beginning with the C. reinhardtii Hsp70A promoter, C. reinhardtii rbcS2 promoter, and the first intron from the C. reinhardtii rbcS2 gene drives the expression of the cre-MIR1157 precursor scaffold. The precursor scaffold is followed by the terminator from the C. reinhardtii rbcS2 gene.

[0033] FIG. 2 shows the secondary structure of the miRNA precursor cre-MIR1157 found in Chlamydomonas reinhardtii. The label “RE site” indicates the restriction site used to ligate artificial miRNAs.

[0034] FIG. 3 shows a representative miRNA*-loop-miRNA fragment and the BglII restriction site used to ligate into SENuc391.

[0035] FIG. 4 shows an expression cassette containing the coding sequence for both the zeocin resistance gene (ble) and the xylanase gene (BD12) linked by the Foot-and-mouth disease virus peptide 2A. The 2A sequence results in a single mRNA transcript, but two polypeptides. RNA interference of the BD12 transcript will result in both a decrease of BD12 protein, BD12 activity, and zeocin resistance.

[0036] FIG. 5 shows analysis of 12 transformants containing the BD12 silencing cassette followed by a wildtype control labeled “21gr” and a BD12-containing strain without the BD12 cassette. A BD12 gene screen control (row A); a western blot (row B); sensitivity to solid TAP media+10 μg/mL zeocin (row C); and sensitivity to solid TAP media+40 μg/mL zeocin (row D) were performed to demonstrate the variance of knockdown as a product of individual transformation events. As BD12 expression is silenced, BD12 protein levels decrease along with an increase to zeocin sensitivity.

[0037] FIG. 6 shows analysis of lysates and cDNA preps of 12 transformants containing the BD12 silencing cassette followed by a wildtype control labeled “21gr” and a BD12-containing strain without the BD12 silencing cassette. The left-hand y axis is transcript level normalized to the control labeled “BD12+”; the right-hand y axis is xylanase activity (units/s); the x axis represents each of the 12 transformants including positive and negative controls. The bars represent the BD12 relative transcript abundance as determined by quantitative PCR; and the solid line represents xylanase activity. As BD12 expression is silenced, BD12 transcript levels decrease along with a decrease in xylanases activity.

[0038] FIG. 7 shows the cre-MIR1157 nucleotide sequence that was amplified from Chlamydomonas reinhardtii CC-1690 (mt+) genomic DNA via PCR. The location of the endogenous miRNA*-loop-miRNA sequences are indicated by “boxes.”

[0039] FIG. 8 shows an exemplary vector, SENuc 146 used in the transformation of the nuclear genome of Chlamydomonas reinhardtii to generate the gene disruption library. The hygromycin resistance gene is indicated by “Aph 7”. It is preceded by the C. reinhardtii Beta2-tubulin promoter and followed by the C. reinhardtii rbcS2 terminator. The first intron from the C. reinhardtii rbcS2 gene is inserted within Aph 7″ to increase expression levels and consequentially, the number of transformants. Following the rbcS2 terminator is the segment labeled “Hybrid Promoter” which consists of a fused promoter beginning with the C. reinhardtii Hsp70A promoter, C. reinhardtii rbcS2 promoter, and the first intron from the C. reinhardtii rbcS2 gene.

[0040] FIG. 9 shows an exemplary vector, SENuc 140 used in the transformation of the nuclear genome of Chlamydomonas reinhardtii to generate the gene disruption library. The paromomycin resistance gene is indicated by “Aph VIII”. It is preceded by the C. reinhardtii psaD promoter and followed by the C. reinhardtii psaD terminator. Following the psaD terminator is the segment labeled “Hybrid Promoter” which consists of a fused promoter beginning with the C. reinhardtii Hsp70A promoter, C. reinhardtii rbcS2 promoter, and the first intron from the C. reinhardtii rbcS2 gene.

[0041] FIG. 10 shows S7 knockdown clones. The y axis is relative transcript abundance of the S7 gene and the x axis represents 5 individual clones (S7-1, S7-2, S7-3, S7-4, and S7-5), wildtype C. reinhardtii (21gr), and the S7 gene disruption strain (S7 KO). Also, salt tolerant strains isolated had reduced transcript levels.

[0042] FIG. 11 shows S16 knockdown clones. The y axis is relative transcript abundance of the S16 gene and the x axis represents 5 individual clones (S16-1, S16-2, S16-3, S16-4, and S16-5), wildtype C. reinhardtii (21gr), and the S16 gene disruption strain (S16 KO). Also, salt tolerant strains isolated had reduced transcript levels.

[0043] FIG. 12 shows two artificial miRNA transformations targeting S7 (rows 2 and 3) on a gradient plate from 0 mM to 200 mM sodium chloride. Wildtype C. reinhardtii (21gr) was plated on the top row. Transformants of the artificial miRNA targeting S7 was characterized as having increased salt tolerance.

[0044] FIG. 13 shows two artificial miRNA transformations targeting S7 (rows 2 and 3) on a gradient plate from 0 mM to 200 mM sodium chloride. Wildtype C. reinhardtii (21gr) was plated on the top row. The original S7 gene disruption strain (acquired through the generation of the library) and labeled “SH7 (S7) knockout” was plated on the bottom row. Transformants of the artificial miRNA targeting S7 and the originally S7 gene disruption strain was characterized as having increased salt tolerance.

[0045] FIG. 14 shows two artificial miRNA transformations targeting S16 (rows 2 and 3) on a gradient plate from 0 mM to 200 mM sodium chloride. Wildtype C. reinhardtii (21gr) was plated on the top row. Transformants of the artificial miRNA targeting S16 was characterized as having increased salt tolerance.

[0046] FIG. 15 shows 42 knockdown colonies for S65 with controls at 75 mM, 100 mM, 125 mM sodium chloride (left to right). The image label “S65” refers to the Plate ID #S65, strain number S65, and Augustus v.5 Protein ID: 517886. See Table 1.

[0047] FIG. 16 shows 42 knockdown colonies for S1659 with controls at 75 mM, 100 mM, 125 mM sodium chloride (left to right). The image label “S59” refers to the Plate ID #S59, strain number S1659, and Protein ID: 178706. See Table 1.

[0048] FIG. 17 shows 42 knockdown colonies for S77 with controls at 75 mM, 100 mM, 125 mM sodium chloride (left to right). The image label “S77” refers to the Plate ID #S77, strain number S77, and Augustus v.5 Protein TD: 522165. See Table 1.

[0049] FIG. 18 shows 42 knockdown colonies for S1666 with controls at 75 mM, 100 mM, 125 mM sodium chloride (left to right). The image label “S66” refers to the Plate ID #S66, strain number S1666, and Augustus v.5 Protein ID: 514721. See Table 1.

[0050] FIG. 19 shows 42 knockdown colonies for S1704 with controls at 75 mM, 100 mM, 125 mM sodium chloride (left to right). The image label “S109” refers to the Plate ID #S109, strain number S1704, and Protein ID: 77062. See Table 1.

[0051] FIG. 20 shows 42 knockdown colonies for S105 with controls at 75 mM, 100 mM, 125 mM sodium chloride (left to right). The image label “S105” refers to the Plate ID #S105, strain number S105, and Augustus v.5 Protein ID: 524679. See Table 1.

[0052] FIG. 21 shows 42 knockdown colonies for S1612 with controls at 75 mM, 100 mM, 125 mM sodium chloride (left to right). The image label “S12” refers to the Plate ID #S12, strain number S1612, and Protein ID: 103075. See Table 1.

[0053] FIG. 22 shows 42 knockdown colonies for S1644 with controls at 75 mM, 100 mM, 125 mM sodium chloride (left to right). The image label “S44” refers to the Plate ID #544, strain number S1644, and Protein ID: 331285. See Table 1.

[0054] FIG. 23 shows 42 knockdown colonies for S1693 with controls at 75 mM, 100 mM, 125 mM sodium chloride (left to right). The image label “S120” refers to the Plate ID #5120, strain number S1693, and Protein ID: 188114. See Table 1.

[0055] FIG. 24 shows 42 knockdown colonies for S1687 with controls at 75 mM, 100 mM, 125 mM sodium chloride (left to right). The image label “S114” refers to the Plate ID #S114, strain number S1687, and Protein ID: 291633. See Table 1.

[0056] FIG. 25 shows 42 knockdown colonies for S129 with controls at 75 mM, 100 mM, 125 mM sodium chloride (left to right). The image label “S129” refers to the Plate ID #S129, strain number S129, and Augustus v.5 Protein ID: 510051. See Table 1.

[0057] FIG. 26 shows 42 knockdown colonies for S123 with controls at 75 mM, 100 mM, 125 mM sodium chloride (left to right). The image label “S123” refers to the Plate ID #S123, strain number S123, and Augustus v.5 Protein ID: 519822. See Table 1.

[0058] FIG. 27 shows 42 knockdown colonies for S289 with controls at 75 mM, 100 mM, 125 mM sodium chloride (left to right). The image label “S289” refers to the Plate ID #S289, strain number S289, and Augustus v.5 Protein ID: 518128. See Table 1.

[0059] FIG. 28 shows 42 knockdown colonies for S276 with controls at 75 mM, 100 mM, 125 mM sodium chloride (left to right). The image label “S276” refers to the Plate ID #S276, strain number S276, and Augustus v.5 Protein ID: 512487. See Table 1.

[0060] FIG. 29 shows 42 knockdown colonies for S292 with controls at 75 mM, 100 mM, 125 mM sodium chloride (left to right). The image label “S292” refers to the Plate ID #S292, strain number S292, and Augustus v.5 Protein ID: 524030. See Table 1.

[0061] FIG. 30 shows 42 knockdown colonies for S291 with controls at 75 mM, 100 mM, 125 mM sodium chloride (left to right). The image label “S291” refers to the Plate ID #S291, strain number S291, and Augustus v.5 Protein ID: 516191. See Table 1.

[0062] FIG. 31 shows 42 knockdown colonies for S294 with controls at 75 mM, 100 mM, 125 mM sodium chloride (left to right). The image label “S294” refers to the Plate ID #S294, strain number S294, and Augustus v.5 Protein ID: 522637. See Table 1.

[0063] FIG. 32 shows 42 knockdown colonies for S338 with controls at 75 mM, 100 mM, 125 mM sodium chloride (left to right). The image label “S338” refers to the Plate ID #S338, strain number S338, and Augustus v.5 Protein ID: 512361. See Table 1.

[0064] FIG. 33 shows 42 knockdown colonies for S74 with controls at 75 mM, 100 mM, 125 mM sodium chloride (left to right). The image label “574” refers to the Plate ID #S74, strain number S74, and Augustus v.5 Protein ID: 520845. See Table 1.

[0065] FIG. 34 shows 42 knockdown colonies for S1613 with controls at 75 mM, 100 mM, 125 mM sodium chloride (left to right). The image label “S1613” refers to the Plate ID #S1613, strain number S1613, and Augustus v.5 Protein ID: 174261. See Table 1.

[0066] FIG. 35 shows 42 colonies for 31621 with controls at 75 mM, 100 mM, and 125 mM sodium chloride (left to right). The image label “S1621” refers to the Plate ID #S1621, strain number S1621, and Protein ID: 206559. See Table 1.

[0067] FIG. 36 shows 42 colonies for S1623 with controls at 75 mM, 100 mM, and 125 mM sodium chloride (left to right). The image label “S1623” refers to the Plate ID #S1623, strain number S1623, and Protein ID: 116145. See Table 1.

[0068] FIG. 37 shows 42 colonies for S1638 with controls at 75 mM, 100 mM, and 125 mM sodium chloride (left to right). The image label “S1638” refers to the Plate ID #31638, strain number S1638, and Protein ID: 418706. See Table 1.

[0069] FIG. 38 shows 42 colonies for S1655 with controls at 75 mM, 100 mM, and 125 mM sodium chloride (left to right). The image label “S1655” refers to the Plate ID #S1655, strain number S1655, and Augustus v.5 Protein ID: 525078. See Table 1.

[0070] FIG. 39 shows S77 knockdown clones. The y axis is relative transcript abundance of the S77 gene and the x axis represents 6 individual clones (S77-1, S77-2, S77-3, S77-4, S77-5, and S77-6), wildtype C. reinhardtii (21gr), and the S77 gene disruption strain (S77 KO). The lower half of the figure shows the sensitivity to NaCl of the 6 individual knockdown clones, wild type C. reinhardtii (21gr), and the S77 gene disruption strain (left to right respectively). Decreased levels of transcript (strains S77-1, S77-2, and S77-3) correspond to increased NaCl resistance. Higher levels of transcript (strains S77-4, S77-5, and S77-6) correspond to increased NaCl sensitivity. Top row is 75 mM NaCl, middle row is 100 mM NaCl, and bottom row is 125 mM NaCl.

[0071] FIG. 40 shows S338 knockdown clones. The y axis is relative transcript abundance of the S338 gene and the x axis represents 6 individual clones (S338-1, S338-2, S338-3, S338-4, S338-5, and S338-6), wildtype C. reinhardtii (21 gr), and the S338 gene disruption strain (S338 KO). The lower half of the figure shows the sensitivity to NaCl of the 6 individual knockdown clones, wild type C. reinhardtii (21gr), and the S338 gene disruption strain (left to right respectively). Decreased levels of transcript (strains S338-1, S338-2, S338-3, S338-5, and S338-6) correspond to increased NaCl resistance. Top row is 75 mM NaCl, middle row is 100 mM NaCl, and bottom row is 125 mM NaCl.

[0072] FIG. 41 shows the segregation analysis results for strain S7 of 5 strains resistant to hygromycin and 5 strains sensitive to hygromycin. The 5 strains resistant to hygromycin are also tolerant to liquid G₀ media+75 mM NaCl whereas the 5 strains sensitive to hygromycin do not grow in liquid G₀ media+75 mM NaCl. These results show that the phenotype (salt tolerance) is genetically linked to the antibiotic selection marker or gene disruption.

### DETAILED DESCRIPTION

[0073] The following detailed description is provided to aid those skilled in the art in practicing the present disclosure. Even so, this detailed description should not be construed to unduly limit the present disclosure as modifications and variations in the embodiments discussed herein can be made by those of ordinary skill in the art without departing from the spirit or scope of the present disclosure.

[0074] As used in this specification and the appended claims, the singular forms “a”, “an” and “the” include plural reference unless the context clearly dictates otherwise.

[0075] Endogenous

[0076] An endogenous nucleic acid, nucleotide, polypeptide, or protein as described herein is defined in relationship to the host organism. An endogenous nucleic acid, nucleotide, polypeptide, or protein is one that naturally occurs in the host organism.

[0077] Exogenous

[0078] An exogenous nucleic acid, nucleotide, polypeptide, or protein as described herein is defined in relationship to the host organism. An exogenous nucleic acid, nucleotide, polypeptide, or protein is one that does not naturally occur in the host organism or is a different location in the host organism.

[0079] Salt Tolerant

[0080] The relative growth of a non-vascular photosynthetic organism in the presence of salinity is termed its salt tolerance. Salt tolerance is the ability of a modified non-vascular photosynthetic organism to display an improved response to an increase in extracellular and/or intracellular concentration of salt including, but not limited to, Na+, Li+ and K+, as compared to an unmodified organism. Increased salt tolerance may be manifested by phenotypic characteristics including, for example, longer life span, increased growth rate, increase productivity, apparent normal growth and function of the plant, and/or a decreased level of necrosis, when subjected to an increase in salt concentration, as compared to an unmodified organism.

[0081] Salt tolerance can be measured by methods known to one of skill in the art, for example, methods as described in Inan et al. (July 2004) Plant Physiol. 135:1718, including without limitation, NaCl shock exposure or gradual increase of NaCl concentration.

[0082] Knockdown

[0083] Transcript levels are considered knocked down when an exogenous nucleic acid is transformed into a host organism to produce a RNA molecule (e.g. miRNA, siRNA) that results in RNA interference/silencing.

[0084] Knockout

[0085] A gene is considered knocked out when an exogenous nucleic acid is transformed into a host organism (e.g. by random insert-ion or homologous recombination) resulting in the disruption (e.g. by deletion, insertion) of the gene.

[0086] Nucleic Acid and Amino Acid Sequences

[0087] Sequence locations designations described below are from http://genome.jgi-psf.org/Chlre4/Chlre4.home.html (Merchant et al., Science, 318:245-250 (2007)).

[0088] SEQ ID NO: 1 Chromosome_{—}6:1409923-1420881-523016

[0089] SEQ ID NO: 2 Chromosome_{—}12:1410423-1416267-512725 Protein kinase, core

[0090] SEQ ID NO: 3 Chromosome_{—}2:7302492-7305976-519629-Armadillo-type fold

[0091] SEQ ID NO: 4 Scaffold_{—}23:64157-70065-520112

[0092] SEQ ID NO: 5 Chromosome_{—}2:7871590-7907018-519707-Phosphatidylinositol 3- and 4-kinase, catalytic

[0093] SEQ ID NO: 6 Chromosome_{—}1:5106386-5121015-511373 and 511374-Calcium-binding EF-hand and Protein kinase, core

[0094] SEQ ID NO: 7 511374

[0095] SEQ ID NO: 8 Chromosome_{—}17:5617386-5620810-517886 and 517887-Leucine-rich repeat

[0096] SEQ ID NO: 9 517887

[0097] SEQ ID NO: 10 Chromosome_{—}6:6885194-6896388-524003

[0098] SEQ ID NO: 11 Chromosome_{—}14:1451054-1454952-515336 and 515337-Calcium-binding EF-hand SEQ ID NO: 12 515337

[0099] SEQ ID NO: 13 74-chromosome_{—}3:2741639-2747917-520845 and 520844-Protein kinase, core

[0100] SEQ ID NO: 14 520844

[0101] SEQ ID NO: 15 Chromosome_{—}4:2134368-2137486-522165-Longin-like

[0102] SEQ ID NO: 16 Chromosome_{—}10:3147531-3149275-510079-Zinc finger, RING-type

[0103] SEQ ID NO: 17 Chromosome_{—}7:5889191-5892195-525104

[0104] SEQ ID NO: 18 Chromosome_{—}16:1660154-1676212-516251

[0105] SEQ ID NO: 19 Chromosome_{—}7:3216450-3222618-524679

[0106] SEQ ID NO: 20 Chromosome_{—}2:8790481-8811695-519822-NSF attachment protein

[0107] SEQ ID NO: 21 Chromosome_{—}10:2994349-2997683-510051

[0108] SEQ ID NO: 22 Chromosome_{—}10:5445553-5448591-510417

[0109] SEQ ID NO: 23 Chromosome_{—}3:1215915-1220466-Gene catalog-175772

[0110] SEQ ID NO: 24 Chromosome_{—}10:1283278-1284432-509766 and 509765-Profilin/allergen

[0111] SEQ ID NO: 25 509765

[0112] SEQ ID NO: 26 Scaffold_{—}22:53087-55615-520043

[0113] SEQ ID NO: 27 Chromosome_{—}9:1628082-1634270-526026-Major facilitator superfamily

[0114] SEQ ID NO: 28 Chromosome_{—}2:2611537-2615015-518848 and 518847-Thioredoxin-like and Alkyl hydroperoxide reductase/Thiol specific antioxidant/Mal allergen

[0115] SEQ ID NO: 29 518847

[0116] SEQ ID NO: 30 Chromosome_{—}1:1574300-1583068-510801-Protein kinase, core

[0117] SEQ ID NO: 31 Chromosome_{—}7:61977-65285-524187-Mitochondrial substrate carrier

[0118] SEQ ID NO: 32 Chromosome_{—}12:7667470-7670704-513869

[0119] SEQ ID NO: 33 Chromosome_{—}2:3580095-3582359-518990

[0120] SEQ ID NO: 34 Chromosome_{—}3:6643095-6648853-521592 and 521593

[0121] SEQ ID NO: 35 521593

[0122] SEQ ID NO: 36 Chromosome_{—}9:1237497-1242515-525958-GTP cyclohydrolase II

[0123] SEQ ID NO: 37 Chromosome_{—}3:5568689-5570263-521411

[0124] SEQ ID NO: 38 Chromosome_{—}16:282424-288402-516007 and 516008-Pumilio RNA-binding region

[0125] SEQ ID NO: 39 516008

[0126] SEQ ID NO: 40 Chromosome_{—}4:1572817-1574661-522081

[0127] SEQ ID NO: 41 Chromosome_{—}6:1447962-1450436-523024

[0128] SEQ ID NO: 42 Chromosome_{—}16:1504475-1506533-516221-Cytochrome b5

[0129] SEQ ID NO: 43 Chromosome_{—}1:2870207-2876411-510991 and 510992-Zinc finger, RING-type

[0130] SEQ ID NO: 44 510992

[0131] SEQ ID NO: 45 Chromosome_{—}11:96916-101650-512152

[0132] SEQ ID NO: 46 Chromosome_{—}10:2157223-2160721-509900

[0133] SEQ ID NO: 47 Chromosome_{—}9:2397180-2401234-526112

[0134] SEQ ID NO: 48 Chromosome_{—}12:5837-34345-512487-Dysferlin, N-terminal

[0135] SEQ ID NO: 49 Chromosome_{—}5:3158380-3168988-522712

[0136] SEQ ID NO: 50 Chromosome_{—}3:7372589-7375277-521690 and 521691

[0137] SEQ ID NO: 51 521691

[0138] SEQ ID NO: 52 Scaffold_{—}18:812020-814034-518128 and 518129

[0139] SEQ ID NO: 53 518129

[0140] SEQ ID NO: 54 Chromosome_{—}16:1333947-1337621-516191-NUDIX hydrolase, core

[0141] SEQ ID NO: 55 Chromosome_{—}6:7046193-7049187-524030

[0142] SEQ ID NO: 56 Chromosome_{—}5:2598236-2603160-522637

[0143] SEQ ID NO: 57 Chromosome_{—}12:5998066-6000934-513600-ARF/SAR superfamily

[0144] SEQ ID NO: 58 Chromosome_{—}12:6007846-6015554-513603 and 513602-ATPase, P-type, K/Mg/Cd/Cu/Zn/Na/Ca/Na/H-transporter

[0145] SEQ ID NO: 59 513602

[0146] SEQ ID NO: 60 Chromosome_{—}5:599204-604348-522399-Protein kinase, core

[0147] SEQ ID NO: 61 Chromosome_{—}11:1798315-1801943-512361-Plexin-like fold

[0148] SEQ ID NO: 62 Chromosome_{—}1:1644920-1653379-510810 and 510811-Suppressor Mra1 and Protein kinase, core

[0149] SEQ ID NO: 63 510811

[0150] SEQ ID NO: 64 Chromosome_{—}11:1635862-1641291-512347

[0151] SEQ ID NO: 65 Chromosome_{—}3:1573144-1573807-520646-Prolyl 4-hydroxylase, alpha subunit

[0152] SEQ ID NO: 66 Chromosome_{—}16:1279888-1286957-516181

[0153] SEQ ID NO: 67 Chromosome_{—}16:4386264-4397213-516652-Protease inhibitor 14, serpin

[0154] SEQ ID NO: 68 Chromosome_{—}1:3599000-3604849-511112-Nonaspanin (TM9SF)

[0155] SEQ ID NO: 69 Chromosome_{—}13:2255306-2255882-514509

[0156] SEQ ID NO: 70 Chromosome_{—}10:1448801-1450093-509796-Protein kinase, core

[0157] SEQ ID NO: 71 Chromosome_{—}3:4748750-4749429-521248-ATPase, F1 complex, delta/epsilon subunit

[0158] SEQ ID NO: 72 Chromosome_{—}5:3179410-3179973-522714

[0159] SEQ ID NO: 73 Chromosome_{—}3:4767136-4768060-521254-DNA/RNA helicase, C-terminal

[0160] SEQ ID NO: 74 Chromosome_{—}1:3081958-3091707-511033

[0161] SEQ ID NO: 75 Chromosome_{—}3:1280615-1281216-520594-Pyrrolo-quinoline quinine

[0162] SEQ ID NO: 76 Chromosome_{—}10:6550769-6551325-510601

[0163] SEQ ID NO: 77 Chromosome_{—}1:9020623-9021459-511987

[0164] SEQ ID NO: 78 Chromosome_{—}6:1607759-1608312-523055-Adenylyl cyclase class-3/4/guanylyl cyclase

[0165] SEQ ID NO: 79 Chromosome_{—}13:3805266-3813325-514736

[0166] SEQ ID NO: 80 Chromosome_{—}6:1189613-1199472-522979-14-3-3 protein

[0167] SEQ ID NO: 81 Scaffold_{—}22:71878-72579-520045-AAA+ ATPase, core

[0168] SEQ ID NO: 82 Chromosome_{—}10:5505341-5513220-510431-ATPase, P-type, K/Mg/Cd/Cu/Zn/Na/Ca/Na/H-transporter

[0169] SEQ ID NO: 83 Chromosome_{—}6:6387040-638749-523923

[0170] SEQ ID NO: 84 S7 transcript with UTRs.

[0171] SEQ ID NO: 85 S7 transcript without UTRs.

[0172] SEQ ID NO: 86 S7 protein sequence.

[0173] SEQ ID NO: 87 shows a 336 bp DNA fragment including the cre-MIR 1157 stem-loop from C. reinhardtii CC-1690 (mt+).

[0174] SEQ ID NO: 88 shows a PCR primer. See Table 3.

[0175] SEQ ID NO: 89 shows a PCR primer. See Table 3.

[0176] SEQ ID NO: 90 shows a PCR primer. See Table 3.

[0177] SEQ ID NO: 91 shows a PCR primer. See Table 3.

[0178] SEQ ID NO: 92 shows a PCR primer. See Table 3.

[0179] SEQ ID NO: 93 shows a PCR primer. See Table 3.

[0180] SEQ ID NO: 94 shows a PCR primer. See Table 3.

[0181] SEQ ID NO: 95 shows a PCR primer. See Table 3.

[0182] SEQ ID NO: 96 shows a PCR primer. See Table 3.

[0183] SEQ ID NO: 97 shows a PCR primer. See Table 3.

[0184] SEQ ID NO: 98 shows a PCR primer. See Table 3.

[0185] SEQ ID NO: 99 shows a PCR primer. See Table 3.

[0186] SEQ ID NO: 100 shows a PCR primer. See Table 3.

[0187] SEQ ID NO: 101 shows a PCR primer. See Table 3.

[0188] SEQ ID NO: 102 shows a PCR primer. See Table 3.

[0189] SEQ ID NO: 103 shows a PCR primer. See Table 3.

[0190] SEQ ID NO: 104 shows a PCR primer. See Table 3.

[0191] SEQ ID NO: 105 shows a PCR primer. See Table 3.

[0192] SEQ ID NO: 106 shows a PCR primer. See Table 3.

[0193] SEQ ID NO: 107 shows a PCR primer. See Table 3.

[0194] SEQ ID NO: 108 shows a PCR primer. See Table 3.

[0195] SEQ ID NO: 109 shows a PCR primer. See Table 3.

[0196] SEQ ID NO: 110 shows a PCR primer. See Table 3.

[0197] SEQ ID NO: 111 shows a PCR primer. See Table 3.

[0198] SEQ ID NO: 112 shows a PCR primer. See Table 3.

[0199] SEQ ID NO: 113 shows a PCR primer. See Table 3.

[0200] SEQ ID NO: 114 shows a PCR primer. See Table 3.

[0201] SEQ ID NO: 115 S7-Augustus v.5 ID: 523016

[0202] SEQ ID NO: 116 S16-Protein ID: 195781, Augustus v.5 ID: 512725

[0203] SEQ ID NO: 117 Protein ID: 103782, Augustus v.5 ID: 519629

[0204] SEQ ID NO: 118 Protein ID: 206633, Augustus v.5 ID: 520112

[0205] SEQ ID NO: 119 Protein ID: 174337, Augustus v.5 ID: 519707

[0206] SEQ ID NO: 120 Protein ID: 146649, Augustus v.5 ID: 511373

[0207] SEQ ID NO: 121 Augustus v.5 ID: 511374

[0208] SEQ ID NO: 122 S65-Protein ID: 410325, Augustus v.5 ID: 517886

[0209] SEQ ID NO: 123 Augustus v.5 ID: 517887

[0210] SEQ ID NO: 124 Protein ID: 144919, Augustus v.5 ID: 524003

[0211] SEQ ID NO: 125 Protein ID: 340425, Augustus v.5 ID: 515336

[0212] SEQ ID NO: 126 Protein ID: 381008, Augustus v.5 ID: 515337

[0213] SEQ ID NO: 127 S74-Augustus v.5 ID: 520845

[0214] SEQ ID NO: 128 Protein ID: 343410, Augustus v.5 ID: 520844

[0215] SEQ ID NO: 129 S77-Protein ID: 136188, Augustus v.5 ID: 522165

[0216] SEQ ID NO: 130 Augustus v.5 ID: 510079

[0217] SEQ ID NO: 131 Protein ID: 393353, Augustus v.5 ID: 525104

[0218] SEQ ID NO: 132 Protein ID: 176993, Augustus v.5 ID: 516251

[0219] SEQ ID NO: 133 S105-Protein ID: 24421, Augustus v.5 ID: 524679

[0220] SEQ ID NO: 134 S123-Protein ID: 151044, Augustus v.5 ID: 519822

[0221] SEQ ID NO: 135 S129-Protein ID: 182890, Augustus v.5 ID: 510051

[0222] SEQ ID NO: 136 Augustus v.5 ID: 510417

[0223] SEQ ID NO: 137 Protein ID: 175772

[0224] SEQ ID NO: 138 Protein ID: 186281, Augustus v.5 ID: 509766

[0225] SEQ ID NO: 139 Augustus v.5 ID: 509765

[0226] SEQ ID NO: 140 Augustus v.5 ID: 520043

[0227] SEQ ID NO: 141 Protein ID: 205891, Augustus v.5 ID: 526026

[0228] SEQ ID NO: 142 Protein ID: 141568, Augustus v.5 ID: 518848

[0229] SEQ ID NO: 143 Protein ID: 182094, Augustus v.5 ID: 518847

[0230] SEQ ID NO: 144 Protein ID: 406326, Augustus v.5 ID: 510801

[0231] SEQ ID NO: 145 Protein ID: 142644, Augustus v.5 ID: 524187

[0232] SEQ ID NO: 146 Protein ID: 173319, Augustus v.5 ID: 513869

[0233] SEQ ID NO: 147 Augustus v.5 ID: 518990

[0234] SEQ ID NO: 148 Augustus v.5 ID: 521592

[0235] SEQ ID NO: 149 Protein ID: 293419, Augustus v.5 ID: 521593

[0236] SEQ ID NO: 150 Protein ID: 163238, Augustus v.5 ID: 525958

[0237] SEQ ID NO: 151 Protein ID: 137074, Augustus v.5 ID: 521411

[0238] SEQ ID NO: 152 Protein ID: 396325, Augustus v.5 ID: 516007

[0239] SEQ ID NO: 153 Protein ID: 35759, Augustus v.5 ID: 516008

[0240] SEQ ID NO: 154 Protein ID: 183391, Augustus v.5 ID: 522081

[0241] SEQ ID NO: 155 Protein ID: 182345, Augustus v.5 ID: 523024

[0242] SEQ ID NO: 156 Protein ID: 131692, Augustus v.5 ID: 516221

[0243] SEQ ID NO: 157 Protein ID: 146316, Augustus v.5 ID: 510991

[0244] SEQ ID NO: 158 Protein ID: 404865, Augustus v.5 ID: 510992

[0245] SEQ ID NO: 159 Protein ID: 394374, Augustus v.5 ID: 512152

[0246] SEQ ID NO: 160 Protein ID: 421582, Augustus v.5 ID: 509900

[0247] SEQ ID NO: 161 Protein ID: 184523, Augustus v.5 ID: 526112

[0248] SEQ ID NO: 162 S276-Augustus v.5 ID: 512487

[0249] SEQ ID NO: 163 Augustus v.5 ID: 522712

[0250] SEQ ID NO: 164 Augustus v.5 ID: 521690

[0251] SEQ ID NO: 165 Augustus v.5 ID: 521691

[0252] SEQ ID NO: 166 S289-Protein ID: 411672, Augustus v.5 ID: 518128

[0253] SEQ ID NO: 167 Protein ID: 185219, Augustus v.5 ID: 518129

[0254] SEQ ID NO: 168 S291-Protein ID: 395916, Augustus v.5 ID: 516191

[0255] SEQ ID NO: 169 S292-Protein ID: 188858, Augustus v.5 ID: 524030

[0256] SEQ ID NO: 170 S294-Protein ID: 187373, Augustus v.5 ID: 522637

[0257] SEQ ID NO: 171 S303-Protein ID: 190294, Augustus v.5 ID: 513600

[0258] SEQ ID NO: 172 Augustus v.5 ID: 513603

[0259] SEQ ID NO: 173 Protein ID: 190292, Augustus v.5 ID: 513602

[0260] SEQ ID NO: 174 Protein ID: 132979, Augustus v.5 ID: 522399

[0261] SEQ ID NO: 175 S338-Protein ID: 151163, Augustus v.5 ID: 512361

[0262] SEQ ID NO: 176 Protein ID: 178371, Augustus v.5 ID: 510810

[0263] SEQ ID NO: 177 Protein ID: 193901, Augustus v.5 ID: 510811

[0264] SEQ ID NO: 178 Protein ID: 151147, Augustus v.5 ID: 512347

[0265] SEQ ID NO: 179 Protein ID: 417522, Augustus v.5 ID: 520646

[0266] SEQ ID NO: 180 Protein ID: 195665, Augustus v.5 ID: 516181

[0267] SEQ ID NO: 181 Protein ID: 288478, Augustus v.5 ID: 516652

[0268] SEQ ID NO: 182 Protein ID: 136718, Augustus v.5 ID: 511112

[0269] SEQ ID NO: 183 Augustus v.5 ID: 514509

[0270] SEQ ID NO: 184 Protein ID: 206095, Augustus v.5 ID: 509796

[0271] SEQ ID NO: 185 Protein ID: 136002, Augustus v.5 ID: 521248

[0272] SEQ ID NO: 186 Protein ID: 294540, Augustus v.5 ID: 522714

[0273] SEQ ID NO: 187 Protein ID: 136100, Augustus v.5 ID: 521254

[0274] SEQ ID NO: 188 Protein ID: 342157, Augustus v.5 ID: 511033

[0275] SEQ ID NO: 189 Protein ID: 206488, Augustus v.5 ID: 520594

[0276] SEQ ID NO: 190 Protein ID: 205974, Augustus v.5 ID: 510601

[0277] SEQ ID NO: 191 Protein ID: 130473, Augustus v.5 ID: 511987

[0278] SEQ ID NO: 192 Augustus v.5 ID: 523055

[0279] SEQ ID NO: 193 Protein ID: 331285, Augustus v.5 ID: 514736

[0280] SEQ ID NO: 194 Protein ID: 187228, Augustus v.5 ID: 522979

[0281] SEQ ID NO: 195 Protein ID: 132213, Augustus v.5 ID: 520045

[0282] SEQ ID NO: 196 Protein ID: 182602, Augustus v.5 ID: 510431

[0283] SEQ ID NO: 197 Augustus v.5 ID: 523923

[0284] SEQ ID NO: 198 S1612-Protein ID: 103075, Augustus v.5 ID: 513845

[0285] SEQ ID NO: 199 S1625-Protein ID: 186846

[0286] SEQ ID NO: 200 S1644-Protein ID: 331285, Augustus v.5 ID: 514736

[0287] SEQ ID NO: 201 S1659-Protein ID: 178706

[0288] SEQ ID NO: 202 S1666-Augustus v.5 ID: 514721

[0289] SEQ ID NO: 203 S1687-Protein ID: 291633

[0290] SEQ ID NO: 204 S1693-Protein ID: 188114

[0291] SEQ ID NO: 205 S1702-Protein ID: 536097

[0292] SEQ ID NO: 206 S1704-Protein ID: 77062

[0293] SEQ ID NO: 2117 S7 amiRNA cloning fragment

[0294] SEQ ID NO: 218 S16 amiRNA cloning fragment

[0295] SEQ ID NO: 219 S65 amiRNA cloning fragment

[0296] SEQ ID NO: 210 S77 amiRNA cloning fragment

[0297] SEQ ID NO: 211 S105 amiRNA cloning fragment

[0298] SEQ ID NO: 212 S123 amiRNA cloning fragment

[0299] SEQ ID NO: 213 S129 amiRNA cloning fragment

[0300] SEQ ID NO: 214 S276 amiRNA cloning fragment

[0301] SEQ ID NO: 215 S289 amiRNA cloning fragment

[0302] SEQ ID NO: 216 S291 amiRNA cloning fragment

[0303] SEQ ID NO: 217 S292 amiRNA cloning fragment

[0304] SEQ ID NO: 218 S294 amiRNA cloning fragment

[0305] SEQ ID NO: 219 S303 amiRNA cloning fragment

[0306] SEQ ID NO: 220 S338 amiRNA cloning fragment

[0307] SEQ ID NO: 221 S1612 amiRNA cloning fragment

[0308] SEQ ID NO: 222 S1644 amiRNA cloning fragment

[0309] SEQ ID NO: 223 S1659 amiRNA cloning fragment

[0310] SEQ ID NO: 224 S1666 amiRNA cloning fragment

[0311] SEQ ID NO: 225 S1687 amiRNA cloning fragment

[0312] SEQ ID NO: 226 S1693 amiRNA cloning fragment

[0313] SEQ ID NO: 227 S1704 amiRNA cloning fragment

[0314] SEQ ID NO: 228 BD11 sequence

[0315] SEQ ID NO: 229 BD11 3′ primer to generate double stranded amiRNA cloning fragment.

[0316] SEQ ID NO: 230 S1613-Protein ID: 174261, Augustus v.5 ID: 519617

[0317] SEQ ID NO: 231 S1621-Protein ID: 206559

[0318] SEQ ID NO: 232 S1623-Protein ID: 116145, Augustus v.5 ID: 511331

[0319] SEQ ID NO: 233 S1638-Protein ID: 418706, Augustus v.5 ID: 521355

[0320] SEQ ID NO: 234 S1655-Augustus v.5 ID: 525078

[0321] SEQ ID NO: 235 S74 amiRNA cloning fragment

[0322] SEQ ID NO: 236 S1613 amiRNA cloning fragment

[0323] SEQ ID NO: 237 S1621 amiRNA cloning fragment

[0324] SEQ ID NO: 238 S1623 amiRNA cloning fragment

[0325] SEQ ID NO: 239 S1638 amiRNA cloning fragment

[0326] SEQ ID NO: 240 S1655 amiRNA cloning fragment

[0327] SEQ ID NO: 241 shows a PCR primer. See Table 3.

[0328] SEQ ID NO: 242 shows a PCR primer. See Table 3.

[0329] SEQ ID NO: 243 shows a PCR primer. See Table 3.

[0330] SEQ ID NO: 244 shows a PCR primer. See Table 3.

[0331] SEQ ID NO: 245 shows a PCR primer. See Table 3.

[0332] SEQ ID NO: 246 shows a PCR primer. See Table 3.

TABLE 1

| Sequence Listing | Protein ID | Strain | Plate |
|---|---|---|---|
| Number | Number | Number | ID# |
| SEQ ID NO: 115 | 523016 (aug5) | S7 | S7 |
| SEQ ID NO: 116 | 195781 | S16 | S16 |
| SEQ ID NO: 122 | 517886 (aug5) | S65 | S65 |
| SEQ ID NO: 201 | 178706 | S1659 | S59 |
| SEQ ID NO: 129 | 522165 (aug5) | S77 | S77 |
| SEQ ID NO: 202 | 514721 (aug5) | S1666 | S66 |
| SEQ ID NO: 206 | 77062 | S1704 | S109 |
| SEQ ID NO: 133 | 524679 (aug5) | S105 | S105 |
| SEQ ID NO: 198 | 103075 | S1612 | S12 |
| SEQ ID NO: 200 | 331285 | S1644 | S44 |
| SEQ ID NO: 204 | 188114 | S1693 | S120 |
| SEQ ID NO: 203 | 291633 | S1687 | S114 |
| SEQ ID NO: 135 | 510051 (aug5) | S129 | S129 |
| SEQ ID NO: 134 | 519822 (aug5) | S123 | S123 |
| SEQ ID NO: 166 | 518128 (aug5) | S289 | S289 |
| SEQ ID NO: 162 | 512487(aug5) | S276 | S276 |
| SEQ ID NO: 169 | 524030 (aug5) | S292 | S292 |
| SEQ ID NO: 168 | 516191 (aug5) | S291 | S291 |
| SEQ ID NO: 170 | 522637 (aug5) | S294 | S294 |
| SEQ ID NO: 175 | 512361 (aug5) | S338 | S338 |
| SEQ ID NO: 127 | 520845 (aug5) | S74 | S74 |
| SEQ ID NO: 230 | 174261 | S1613 | S1613 |
| SEQ ID NO: 231 | 206559 | S1621 | S1621 |
| SEQ ID NO: 232 | 116145 | S1623 | S1623 |
| SEQ ID NO: 233 | 418706 | S1638 | S1638 |
| SEQ ID NO: 234 | 525078 (aug5) | S1655 | S1655 |

*aug5 refers to the Augustus v.5 Protein ID database. These are used because the standard annotation of the C. reinhardtii genome does not include those genes. Augustus v.5 is generated by a gene prediction algorithm.

[0333] RNA Silencing

[0334] Chlamydomonas reinhardtii is a single-celled green alga that is an ideal model system for studying several biological processes. Its recently sequenced genome has advanced our understanding of the ancestral eukaryotic cell and revealed many previously unknown genes that may be associated with photosynthetic and flagellar functions (for example, as described in Merchant. S. S., et al. (2007) Science, 318, 245-250). Analysis of this genome requires a convenient system for reverse genetic analysis.

[0335] Transposon tagging, insertional nmutagenesis and tilling have been highly successful reverse genetics tools in flowering plants (for example, as described in Alonso, J. M. and Ecker, J. R. (2006) Natl. Rev. Genet., 7, 524-536), but have not yet been fully developed in Chlamydomonas. Saturating entire genomes by these approaches requires very large mutant populations and can be limited by the selectivity of mutational targeting. Alternative methods for high-throughput analysis of gene function are based on RNA silencing. They exploit a conserved cellular mechanism that probably evolved as a defense strategy against viruses and transposons and that has been adopted for endogenous gene regulation in many eukaryotes (for example, as described in Baulcombe, D. (2006) Short Silencing RNA: The Dark Matter of Geneics? Cold Spring Harb. Symp. Quant. Biol., LXXI, 13-20). Small RNAs (21-24 nucleotides (nt)) are central components in this process, providing sequence specificity for the effector complexes of the silencing machinery.

[0336] There are two main classes of small RNAs in RNA silencing: small interfering RNAs (siRNAs) and microRNAs (miRNAs). The siRNAs are produced from a perfectly double-stranded (ds) RNA by RNaseIII-like enzymes (Dicer or Dicer-like), releasing several double-stranded intermediates of about 21 nt in length, with a two-nucleotide 3′overhang (for example, as described in Elbashir, S. M., et al. (2001) Genes Dev., 15, 188-200). In contrast, miRNA intermediates are released by Dicer as a 21-24-nt RNA duplex from a partly double-stranded region of an imperfectly matched foldback RNA (for example, as described in Ambros, V. (2001) Cell, 107, 823-826). Each miRNA precursor typically gives rise to one predominant 21-24-nt RNA duplex whereas multiple forms of this molecule are generated from siRNA precursors.

[0337] The short dsRNAs are processed similarly in both miRNA and siRNA pathways. The strands with lower thermodynamic stability at their 5′ ends are stably retained by an Argonaute (AGO) protein (for example, as described in Khvorova, A., et al. (2003) Cell, 115, 209-216; and Schwarz, D. S., et al. (2003) Cell, 115, 199-208) through a mechanism that is influenced by the 5′ nucleotide (for example, as described in Mi, S., et al. (2008) Cell, 133, 116-127). The resulting AGO ribonucleoprotein is the effector of silencing that is guided to its target nucleic acids through Watson-Crick base pairing with the bound small RNA. The small RNA strand that is not incorporated into the Argonaute is referred to as the passenger strand or miRNA* and is rapidly degraded.

[0338] The targeting mechanisms involve transcriptional or posttranscriptional regulation of the target sequence. The transcriptional silencing mechanism is not well understood and it has not been used in methods for functional analysis of genome sequences. The post-transcriptional mechanisms, in contrast, are better understood in detail and have been used widely. They involve translational arrest or targeted RNA degradation, either by mRNA destabilization or miRNA guided cleavage (for example, as described in Bartel, D. P. (2004) Cell, 116, 281-297); small RNAs displaying partial complementarity to the target RNA typically cause translational inhibition whereas those with a complete or near-complete match are more likely to direct mRNA cleavage. The miRNAs in animals are often complementary to their target in a short seed region (positions 2 to 8) allowing each miRNA to target many, often hundreds, of mRNAs (for example, as described in Brennecke, J., et al. (2005) PloS Biology, 3, e85; Farh, K. K., et al. (2005) Science, 310, 1817-1821; Lewis, B. P., et al. (2005) Cell, 120, 15-20; and Lim, L. P., et al. (2005) Nature, 433, 769-773). In contrast, plant miRNAs have few (zero to five) mismatches to their targets and normally trigger transcript cleavage and subsequent degradation of a limited number of mRNAs (for example, as described in Llave, C., et al. (2002) Science, 297, 2053-2056; and Schwab, R., et al. (2005) Developmental Cell, 8, 517-527).

[0339] An alternative to the use of long dsRNA transgenes to down-regulate a gene of interest involves modified versions of endogenous miRNA (for example, as described in Zeng, Y., et al. (2002) Molecular Cell, 9, 1327-1333; Parizotto, E. A., et al. (2004) Genes Dev., 18, 1-6; Alvarez, J. P., et al. (2006) The Plant Cell, 18, 1134-1151; Niu, Q. W., et al. (2006) Natl. Biotechnol., 24, 1420-1428; Schwab, R., et al. (2006) The Plant Cell, 18, 1121-1133; and Warthmann, N., et al. (2008) PloS ONE, 3, e1829). This artificial miRNA approach overcomes the self-silencing problems of siRNAs because miRNAs are not normally associated with transcriptional silencing. In addition, each artificial miRNA precursor gives rise to only a single small RNA species that can be optimized to avoid off-target effects, at least in the case of organisms with complete genome information.

[0340] Chlamydomonas miRNA loci can be subdivided into two categories. Those in the ‘short hairpin’ category resemble typical miRNA loci of land plants and animals in that the hairpin regions are shorter than 150 nt and they specify a single miRNA. The predicted transcripts of ‘long hairpin’ loci in Chlamydomonas can form long (150-729 nt) almost perfect hairpins, with the potential to produce multiple small RNAs (for example, as described in Molnar, A., et al. (2007) Nature, 447, 1126-1129; and Zhao, T., et al. (2007) Genes Dev., 21, 1190-1203).

[0341] Artificial miRNAs (amiRNAs) can be used as a highly specific, high-throughput silencing system to verify a desired phenotype (for example, a salt, herbicide, or bleach resistance organism) that is the result of the expression of a candidate gene.

[0342] The present disclosure recognizes that large scale cultures of algae can be used to produce a variety of biomolecules. The disclosed methods, constructs, algae, and cells are provided to fully realize the advantages of algal cultures for large-scale production of useful biomolecules as well as for other purposes, such as, for example, carbon fixation or decontamination of compounds, solutions, or mixtures. The present disclosure also recognizes the potential for algae, through photosynthetic carbon fixation, to convert CO₂ to sugar, starch, lipids, fats, or other biomolecules, thereby removing a greenhouse gas from the atmosphere while providing therapeutic or industrial products, a fuel product, or nutrients for human or animal consumption. To enable large scale growth of algal cultures in open ponds or large containers in which they efficiently and economically have access to CO₂ and light, it is important to deter the growth of competing organisms that might otherwise contaminate and even overtake the culture. Provided herein are algae in which genes have been knocked out or knocked down to confer salt tolerance, such that the algae are able to grow in the presence of salt at a concentration that deters growth of algae not harboring the knock out or knock down gene. The concentration of salt may also deter the growth of other organisms, such as, but not necessarily limited to, other algal species.

[0343] Plant species, which includes algae, vary in how well they tolerate salt. Some plants will tolerate high levels of salinity while others can tolerate little or no salinity. The relative growth of plants in the presence of salinity is termed their salt tolerance. Salt tolerance is the ability of a modified plant or plant cell (also host cell or organism) to display an improved response to an increase in extracellular and/or intracellular concentration of salt including, but not limited to, Na+, Li+ and K+, as compared to an unmodified plant or plant cell. Increased salt tolerance may be manifested by phenotypic characteristics including longer life span, apparent normal growth and function of the plant, and/or a decreased level of necrosis, when subjected to an increase in salt concentration, as compared to a unmodified plant. Salt tolerance is measured by methods known in the art such as those described in Inan et al. (July 2004) Plant Physiol. 135:1718, including without limitation, NaCl shock exposure or gradual increase NaCl concentration.

[0344] A transgenic algal cell of the present disclosure has increased salt tolerance with respect to a wild type algal cell that does not contain the knock out or knock down gene. In some embodiments, the salt tolerance is at least twice that of a wildtype alga. The salt tolerance can be at least 1.5, 2, 2.5, 3, 3.5, 4, 5 or more than 5 fold higher than that of a wildtype alga.

[0345] The salt used in the present disclosure can be a sodium (Na+) salt, a lithium (Li+) salt, or a potassium (K+) salt. The concentration of Na+ in the selection media for the transgenic algae of the present disclosure can be at least 200 mM. The concentration of Li+ in the selection media for the transgenic algae of the present disclosure can be at least 2 mM,

[0346] Algae

[0347] The present disclosure provides algae and algal cells in which one or more polynucleotides have been knocked out to confer salt tolerance. Also provided are algae and algal cells transformed with a polynucleotide encoding the Bt toxin that is lethal to some insect and rotifer species. The transformed algae may be referred to herein as “host algae”.

[0348] Algae in which genes have been knocked out to provide salt tolerance as disclosed herein can be macroalgae or microalgae. Microalgae include eukaryotic microalgae and cyanobacteria.

[0349] An exemplary group of organisms for use in the present disclosure are species of the green algae (Chlorophyta). These algae are found in soil, fresh water, oceans, and even in snow on mountaintops. Algae in this genus have a cell wall, a chloroplast, and two anterior flagella allowing mobility in liquid environments. More than 500 different species of Chlamydomonas have been described.

[0350] The most widely used laboratory species is C. reinhardtii. When deprived of nitrogen, C. reinhardtii cells can differentiate into isogametes. Two distinct mating types, designated mt+ and mt−, exist. These fuse sexually, thereby generating a thick-walled zygote which forms a hard outer wall that protects it from various environmental conditions. When restored to nitrogen culture medium in the presence of light and water, the diploid zygospore undergoes meiosis and releases four haploid cells that resume the vegetative life cycle. In mitotic growth the cells double as fast as every eight hours.

[0351] The nuclear genetics of C. reinhardtii is well established. There are a large number of mutants that have been characterized and the C. reinhardtii center (www.chlamy.org) maintains an extensive collection of mutants, as well as annotated genomic sequences of Chlamydomonas species. A large number of chloroplast mutants as well as several mitochondrial mutants have been developed in C. reinhardtii.

[0352] While the methods and transformed cells are described herein with C. reinhardtii in some exemplary aspects, it is understood that the methods and transformants described herein are also applicable to other algae, including cyanobacteria such as but not limited to Synechococcus, Synechocystis, Athrospira, Anacytis, Anabaena, Nostoc, Spirulina, and Fremyella species and including green microalgae such as but not limited to Dunaliella, Scenedesmus, Chlorella, Volvox, or Hematococcus species.

[0353] Transformed cells are produced by introducing DNA into a population of target cells and selecting the cells which have taken up the DNA. In some embodiments, knock outs or knock downs that confer resistance to salt may be grown in the presence of high salt concentrations to select for successful knock outs or knock downs. The knock out or knock down sequence can be introduced into an algal cell using a direct gene transfer method such as, for example, electroporation, microprojectile mediated (biolistic) transformation using a particle gun, the “glass bead method” or by cationic lipid or liposome-mediated transformation.

[0354] Nuclear transformation of eukaryotic algal cells can be by microprojectile mediated transformation, or can be by protoplast transformation, electroporation, introduction of DNA using glass fibers, or the glass bead agitation method, as nonlimiting examples (Kindle. Proc. Natl. Acad. Sciences USA 87: 1228-1232 (1990); Shimogawara et al. Genetics 148: 1821-1828 (1998)). Markers for nuclear transformation of algae include, without limitation, markers for rescuing auxotrophic strains (e.g., NIT1 and ARG7 in Chlamydomonas; Kindle et al. J. Cell Biol. 109: 2589-2601 (1989), Debuchy et al. EMBO J. 8: 2803-2809 (1989)), as well as dominant selectable markers (e.g., CRY1, aada; Nelson et al. Mol. Cellular Biol. 14: 4011-4019 (1994), Cerutti et al. Genetics 145: 97-110 (1997)). In some embodiments, the presence of the knock out or knock down is used as a selectable marker for transformants. A knock out sequence can in some embodiments be co-transformed with a second sequence encoding a protein to be produced by the alga (for example, a therapeutic protein, industrial enzyme) or a protein that promotes or enhances production of a commercial, therapeutic, or nutritional product. The second sequence is in some embodiments provided on the same nucleic acid construct as the knock out sequence for transformation into the alga, in which the success of the knock out sequence in activating the gene of interest is used as the selectable marker.

[0355] Several cell division cycles following transformation are generally required to reach a homoplastidic state. Algae may be allowed to divide in the presence or absence of a selection agent, or under stepped-up selection (use of a lower concentration of the selective agent than homoplastic cells would be expected to grow on, which can be increased over time) prior to screening transformants. Screening of transformants by PCR or Southern hybridization, for example, can be performed to determine whether a transformant is homoplastic or heteroplastic, and if heteroplastic, the degree to which the recombinant gene has integrated into copies of the chloroplast genome.

[0356] For transformation of chloroplasts, a major benefit can be the utilization of a recombinant nucleic acid construct which contains both the knock out sequence and one or more genes of interest. Typically, transformation of chloroplasts is performed by co-transformation of chloroplasts with two constructs: one containing knock out sequence and a second containing the gene(s) of interest. Transformants are screened for presence of the knock out or knock down (salt tolerance) and, in some embodiments, for the presence of (a) further gene(s) of interest. Typically, secondary screening for one or more gene(s) of interest is performed by PCR or Southern blot (see, for example PCT/US2007/072465).

[0357] The organisms/host cells herein can be transformed to modify the production of a product(s) with a vector, in this case to decrease or eliminate production of a product(s). The vector is typically substantially homologous to the gene to be knocked out to allow for homologous recombination to take place, but has been modified in such a way that the product normally produced by the gene is not produced, is produced in an inactive form, or is produced in a form in which the normal activity of the product is greatly reduced.

[0358] One approach to construction of a genetically manipulated strain of alga involves transformation with a nucleic acid which inactivates a gene of interest to, for example, confer resistance to salt. In some embodiments, a transformation may introduce nucleic acids into the host alga cell (for example, a chloroplast or nucleus of a eukaryotic host cell). Transformed cells are typically plated on selective media following introduction of exogenous nucleic acids. This method may also comprise several steps for screening. Initially, a screen of primary transformants is typically conducted to determine which clones have proper insertion of the exogenous nucleic acids. Clones which show the proper integration may be replica plated and re-screened to ensure genetic stability. Such methodology ensures that the genes of interest have been knocked out or knocked down. In many instances, such screening is performed by polymerase chain reaction (PCR); however, any other appropriate technique known in the art may be utilized, Many different methods of PCR are known in the art (for example, nested PCR, real time PCR).

[0359] The entire chloroplast genome of C. reinhardtii is available as GenBank Acc. No. BK000554 and reviewed in J. Maul, et al. The Plant Cell 14: 2659-2679 (2002), both incorporated by reference herein. The Chlamydomonas genome is also provided to the public on the world wide web, at the URL “biology.duke.edu/chlamy_genome/-chloro.html” (see “view complete genome as text file” link and “maps of the chloroplast genome” link), each of which is incorporated herein by reference. To create a knock out, the nucleotide sequence of the chloroplast genomic DNA is selected such that it is a portion of a gene of interest, including a regulatory sequence or coding sequence. In this respect, the website containing the C. reinhardtii chloroplast genome sequence also provides maps showing coding and non-coding regions of the chloroplast genome, thus facilitating selection of a sequence useful for constructing a knock out vector.

[0360] A knock out nucleic acid molecule may include a nucleotide sequence encoding a reporter polypeptide or other selectable marker. The term “reporter” or “selectable marker” refers to a polynucleotide (or encoded polypeptide) that confers a detectable phenotype. A reporter generally encodes a detectable polypeptide, for example, a green fluorescent protein or an enzyme such as luciferase, which, when contacted with an appropriate agent (a particular wavelength of light or luciferin, respectively) generates a signal that can be detected by eye or using appropriate instrumentation (Giacomin, Plant Sci. 116:59-72, 1996; Scikantha, J. Bacteriol. 178:121, 1996; Gerdes, FEBS Lett. 389:44-47, 1996; see, also, Jefferson, EMBO J. 6:3901-3907, 1997, fl-glucuronidase).

[0361] A selectable marker can provide a means to rapidly screen prokaryotic cells or plant cells or both that have incorporated the knock out sequence and so express the marker. Examples of selectable markers include, but are not limited to, those that confer antimetabolite resistance, for example, dihydrofolate reductase, which confers resistance to methotrexate (Reiss, Plant Physiol. (Life Sci. Adv.) 13:143-149, 1994); neomycin phosphotransferase, which confers resistance to the aminoglycosides neomycin, kanamycin and paromycin (Herrera-Estrella, EMBO J. 2:987-995, 1983), hygro, which confers resistance to hygromycin (Marsh, Gene 32:481-485, 1984), trpB, which allows cells to utilize indole in place of tryptophan; hisD, which allows cells to utilize histinol in place of histidine (Hartman, Proc. Natl. Acad. Sci., USA 85:8047, 1988); mannose-6-phosphate isomerase which allows cells to utilize mannose (WO 94/20627); ornithine decarboxylase, which confers resistance to the ornithine decarboxylase inhibitor, 2-(difluoromethyl)-DL-ornithine (DFMO; McConlogue, 1987, in: Current Communications in Molecular Biology, Cold Spring Harbor Laboratory ed.); and deaminase from Aspergillus terreus, which confers resistance to Blasticidin S (Tamura, Biosci. Biotechnol Biochem. 59:2336-2338, 1995). Selectable markers include polynucleotides that confer dihydrofolate reductase (DHFR) or neomycin resistance for eukaryotic cells and tetracycline; ampicillin resistance for prokaryotes such as E. coli; and bleomycin, gentamycin, glyphosate, hygromycin, kanamycin, methotrexate, phleomycin, phosphinotricin, spectinomycin, streptomycin, sulfonamide and sulfonylurea resistance in plants (see, for example, Maliga et al., Methods in Plant Molecular Biology, Cold Spring Harbor Laboratory Press, 1995, page 39).

[0362] Salt tolerance can also be a selectable marker. The host algae disclosed herein that are transformed with polynucleotides knocking out or knocking down one or more genes in order to confer resistance to salt may be selected for with elevated salt concentrations. Alternatively, a selectable marker such as kanamycin or bleomycin or nitrate reductase may be co-transformed with the knock out sequence, and transformed cells can initially be selected for using a selection media or compound that is not related to the knocked out gene.

[0363] Large scale cultures of algae bioengineered for salt tolerance can be used for the production of biomolecules, which can be therapeutic, nutritional, commercial, or fuel products, or for fixation of CO₂, or for decontamination of compounds, mixtures, samples, or solutions. The salt tolerant algae provided herein can be grown in a concentration of salt that can impede or prevent the growth of species other than the algal species used for bioproduction, decontamination, or CO₂ fixation. In certain embodiments the concentration of salt is 1.5, 2, 2.5, 3, 3.5, 4, 4.5, 5 or greater than 5 times tolerated by the corresponding wild type alga. In other embodiments the average concentration of Na²⁺ is 200 mM or more. In still other embodiments the concentration of Li⁺ in the medium is about 2 mM or more. In certain embodiments of the disclosure, a host alga engineered to provide salt tolerance is transformed with one or more additional genes that encodes an exogenous or endogenous protein that is produced by the alga when it is grown in culture, in which the exogenous or endogenous protein is a therapeutic, nutritional, commercial, or fuel product, or increases production or facilitates isolation of a therapeutic, nutritional, commercial, or fuel product.

[0364] A salt resistant alga as provided herein may be used in some embodiments to produce biomolecules that are endogenous or not endogenous to the algal host. In some embodiments, the genetically engineered salt tolerant algae can be cultured for environmental remediation or CO₂ fixation. The algae may additionally be transformed with one or more recombinant exogenous or endogenous polynucleotides that enable growth of the algae in the presence of at least one herbicide. Genetic engineering of algae to confer resistance to herbicides has been described in U.S. patent application 61/142,091 filed Dec. 31, 2008, which in incorporated reference in its entirety.

[0365] In some embodiments, a prokaryotic alga provided herein is resistant to one or more herbicides in addition to being salt tolerant. A prokaryotic alga can include a first recombinant exogenous or endogenous herbicide resistance gene conferring resistance to a first herbicide and a second exogenous or endogenous herbicide resistance gene conferring resistance to a second herbicide.

[0366] The polynucleotide encoding the herbicide resistance gene can be provided in a vector for transformation of the algal host. In some embodiments, the vector is designed for integration into the host genome, and can include, for example, sequences having homology to the host genome flanking the herbicide resistance gene to promote homologous recombination. In other embodiments, the vector can have an origin of replication such that it can be maintained in the host as an autonomously replicating episome. In some embodiments, the protein-encoding sequence of the polynucleotide is codon biased to reflect the codon bias of the host alga.

[0367] The disclosure also provides a salt tolerant eukaryotic alga further comprising one or more recombinant polynucleotide sequences encoding proteins that confer resistance to herbicides, in which each of the proteins confers resistance to a different herbicide. In some embodiments, an herbicide resistant alga transformed with herbicide resistance genes is resistant to two or more herbicides that inhibit different amino acid biosynthesis pathways, for example, glyphosate and sulfonylureas, or glyphosate and phosphinothricin. In some embodiments, an herbicide resistant alga transformed with herbicide resistance genes is resistant to two or more herbicides, in which at least one herbicide inhibits an amino acid biosynthesis pathway, and at least one herbicide does not inhibit an amino acid biosynthesis pathway. For example, an herbicide resistant alga can include recombinant genes conferring glyphosate resistance and resistance to norflurazon.

[0368] In some embodiments of an alga comprising two or more recombinant polynucleotide sequences encoding proteins that confer resistance to herbicides, at least one of the recombinant polynucleotides encodes an endogenous protein conferring herbicide resistance. In some embodiments, at least one of the polynucleotides encodes an exogenous protein conferring herbicide resistance.

[0369] Also disclosed herein are methods of producing one or more biomolecules, in which the methods include engineering an alga by knocking out one or more genes thereby conferring salt tolerance, growing the alga in the presence of the elevated salt concentrations, and harvesting one or more biomolecules from the alga or algal media. The methods in some embodiments include isolating the one or more biomolecules.

[0370] The genetically engineered salt tolerant alga is grown in media containing a concentration of a salt that permits growth of the transformed alga, but inhibits growth of the same species of alga that is not engineered to confer resistance to the salt. In some embodiments, the concentration of salt in the media in which the genetically engineered alga is grown to produce a biomolecule or product inhibits the growth of at least one other algal species. In some embodiments, the concentration of salt in the media in which the genetically engineered alga is grown to produce a biomolecule or product inhibits the growth of at least one bacterial species or at least one fungal species. The concentration for optimal bioproduction by the host alga and inhibition of growth of other nontransformed species can be empirically determined.

[0371] In some embodiments, genetically engineered salt tolerant algae that include one or more recombinant polynucleotides encoding proteins each conferring resistance to a different herbicide are grown in media containing one or more herbicides. The one or more herbicides in combination can inhibit the growth of any combination of at least one algal species, at least one bacterial species, and at least one fungal species.

[0372] A product (for example fuel product, fragrance product, insecticide product, commercial product, therapeutic product) may be produced by an algal culture by a method that comprises the step of growing/culturing a salt tolerant alga in media that includes elevated concentrations of one or more salts such as NaCl or LiCl or both. The methods herein can further comprise the step of collecting a product produced by the organism. The product can be the product of an exogenous nucleotide transformed into the alga. In some embodiments, the product (for example fuel product, fragrance product, insecticide product) is collected by harvesting the organism. The product may then be extracted from the organism.

[0373] In one embodiment, methods are provided for producing a biomass-degrading enzyme in an alga, in which the methods include engineering the alga to knock out one or more genes thereby conferring salt tolerance to the alga and transforming the alga with a sequence encoding an exogenous biomass-degrading enzyme or which promotes increased expression of an endogenous biomass-degrading enzyme; growing the alga in the presence of elevated concentrations of one or more salts and under conditions which allow for production of the biomass-degrading enzyme, in which the salt is in sufficient concentration to inhibit growth of the alga which has not been engineered for salt tolerance, to producing the biomass-degrading enzyme. The methods in some embodiments include isolating the biomass-degrading enzyme.

[0374] In some embodiments, the expression of the product (for example fuel product, fragrance product, insecticide product) is inducible. The product may be induced to be expressed. Expression may be inducible by light. In yet other embodiments, the production of the product is autoregulatable. The product may form a feedback loop, wherein when the product (for example fuel product, fragrance product, insecticide product) reaches a certain level, expression of the product may be inhibited. In other embodiments, the level of a metabolite of the organism inhibits expression of the product. For example, endogenous ATP produced by the organism as a result of increased energy production to express the product, may form a feedback loop to inhibit expression of the product. In yet another embodiment, production of the product may be inducible, for example, by light or an exogenous agent. For example, an expression vector for effecting production of a product in the host organism may comprise an inducible regulatory control sequence that is activated or inactivated by an exogenous agent.

[0375] The methods herein may further comprise the step of providing to the organism a source of inorganic carbons, such as flue gas. In some instances, the inorganic carbon source provides all of the carbons necessary for making the product (for example, fuel product). The growing/culturing step can occur in a suitable medium, such as one that has minerals and/or vitamins in addition to elevated concentrations of one or more salts.

[0376] The methods herein comprise selecting genes that are useful to produce products, such as fuels, fragrances, therapeutic compounds, and insecticides, transforming genetically engineered salt tolerant algae with such gene(s), and growing such algae in the presence of elevated concentrations of one or more salts under conditions suitable to allow the product to be produced. Organisms can be cultured in conventional fermentation bioreactors, which include, but are not limited to, batch, fed-batch, cell recycle, and continuous fermentors. Further, they may be grown in photobioreactors (see for example US Appl. Publ. No. 20050260553; U.S. Pat. No. 5,958,761; U.S. Pat. No. 6,083,740). Culturing can also be conducted in shake flasks, test tubes, microtiter dishes, and petri plates. Culturing is carried out at a temperature, pH and oxygen content appropriate for the recombinant cell and at a salt concentration that permits growth and bioproduction by the algae.

[0377] The genetically engineered, salt tolerant algae and methods provided herein can expand the culturing conditions of the algae to larger areas that may be open and, in the absence of resistance, subject to contamination of the culture, for example, on land, such as in landfills. In some cases, organism(s) are grown near ethanol production plants or other facilities or regions (for example, cities, highways, etc.) generating CO₂. As such, the methods herein contemplate business methods for selling carbon credits to ethanol plants or other facilities or regions generating CO₂ while making fuels by growing one or more of the modified organisms described herein in the presence of elevated concentrations of one or more salts.

[0378] Host Cells or Host Organisms

[0379] Biomass useful in the methods and systems described herein can be obtained from host cells or host organisms that have been modified (e.g. genetically engineered) to be, for example, salt tolerant, herbicide resistant, or sodium hypochlorite resistant, as compared to an unmodified organism. In addition, the host cells or host organism can be further modified to express an exogenous or endogenous protein, such as a protein involved in the isoprenoid biosynthetic pathway or a protein involved in the accumulation and/or secretion of fatty acids, glycerol lipids, or oils.

[0380] A host cell can contain a polynucleotide encoding a polypeptide of the present disclosure. In some embodiments, a host cell is part of a multicellular organism. In other embodiments, a host cell is cultured as a unicellular organism.

[0381] Host organisms can include any suitable host, for example, a microorganism. Microorganisms which are useful for the methods described herein include, for example, photosynthetic bacteria (e.g., cyanobacteria), non-photosynthetic bacteria (e.g., E. coli), yeast (e.g., Saccharomyces cerevisiae), and algae (e.g., microalgae such as Chlamydomonas reinhardtii).

[0382] Examples of host organisms that can be transformed with a polynucleotide of interest (for example, a polynucleotide that encodes a protein involved in the isoprenoid biosynthesis pathway) include vascular and non-vascular organisms. The organism can be prokaryotic or eukaryotic. The organism can be unicellular or multicellular. A host organism is an organism comprising a host cell. In other embodiments, the host organism is photosynthetic. A photosynthetic organism is one that naturally photosynthesizes (e.g., an alga) or that is genetically engineered or otherwise modified to be photosynthetic. In some instances, a photosynthetic organism may be transformed with a construct or vector of the disclosure which renders all or part of the photosynthetic apparatus inoperable.

[0383] By way of example, a non-vascular photosynthetic microalga species (for example, C. reinhardtii, Nannochloropsis oceania, N. salina, D. salina, H. pluvalis, S. dimorphus, D. viridis, Chlorella sp., and D. teriolecta) can be genetically engineered to produce a polypeptide of interest, for example a fusicoccadiene synthase or an FPP synthase. Production of a fusicoccadiene synthase or an FPP synthase in these microalgae can be achieved by engineering the microalgae to express the fusicoccadiene synthase or FPP synthase in the algal chloroplast or nucleus.

[0384] In other embodiments the host organism is a vascular plant. Non-limiting examples of such plants include various monocots and dicots, including high oil seed plants such as high oil seed Brassica (e.g., Brassica nigra, Brassica napus, Brassica hirta, Brassica rapa, Brassica campestris, Brassica carinata, and Brassica juncea), soybean (Glycine max), castor bean (Ricinus communis), cotton, safflower (Carthamus tinctorius), sunflower (Helianthus annuus), flax (Linum usitatissimum), corn (Zea mays), coconut (Cocos nucifera), palm (Elaeis guineensis), oil nut trees such as olive (Olea europaea), sesame, and peanut (Arachis hipogaea), as well as Arabidopsis, tobacco, wheat, barley, oats, amaranth, potato, rice, tomato, and legumes (e.g., peas, beans, lentils, alfalfa, etc.).

[0385] The host cell can be prokaryotic. Examples of some prokaryotic organisms of the present disclosure include, but are not limited to, cyanobacteria (e.g., Synechococcus, Synechocystis, Athrospira, Anacytis, Anabaena, Nostoc, Spirulina, Fremyella, Gleocapsa, Oscillatoria, and, Pseudoanabaena). Suitable prokaryotic cells include, but are not limited to, any of a variety of laboratory strains of Escherichia coli, Lactobacillus sp., Salmonella sp., and Shigella sp. (for example, as described in Carrier et al. (1992) J. Immunol. 148:1176-1181; U.S. Pat. No. 6,447,784; and Sizemore et al. (1995) Science 270:299-302). Examples of Salmonella strains which can be employed in the present disclosure include, but are not limited to, Salmonella typhi and S. typhimurium. Suitable Shigella strains include, but are not limited to, Shigella flexneri, Shigella sonnei, and Shigella disenteriae. Typically, the laboratory strain is one that is non-pathogenic. Non-limiting examples of other suitable bacteria include, but are not limited to, Pseudomonas pudita, Pseudomonas aeruginosa, Pseudomonas mevalonii, Rhodobacter sphaeroides, Rhodobacter capsulatus, Rhodospirillum rubrum, and Rhodococcus sp.

[0386] In some embodiments, the host organism is eukaryotic (e.g. green algae, red algae, brown algae). In some embodiments, the algae is a green algae, for example, a Chlorophycean. The algae can be unicellular or multicellular. Suitable eukaryotic host cells include, but are not limited to, yeast cells, insect cells, plant cells, fungal cells, and algal cells. Suitable eukaryotic host cells include, but are not limited to, Pichia pastoris, Pichia finlandica, Pichia trehalophila, Pichia koclamae, Pichia membranaefaciens, Pichia opuntiae, Pichia thermotolerans, Pichia salictaria, Pichia guercuum, Pichia pijperi, Pichia stiptis, Pichia methanolica, Pichia sp., Saccharomyces cerevisiae, Saccharomyces sp., Hansenula polymorpha, Kluyveromyces sp., Kluyveromyces lactis, Candida albicans, Aspergillus nidulans, Aspergillus niger, Aspergillus oryzae, Trichoderma reesei, Chrysosporium lucknowense, Fusarium sp., Fusarium gramineum, Fusarium venenatum, Neurospora crassa, and Chlamydomonas reinhardtii.

[0387] In some embodiments, eukaryotic microalgae, such as for example, a Chlamydomonas, Volvacales, Dunaliella, Scenedesmus, Chlorella, or Hematococcus species, are used in the disclosed methods. In other embodiments, the host cell is Chlamydomonas reinhardtii, Dunaliella salina, Haematococcus pluvialis, Nannochloropsis oceania, N. salina. Scenedesmus dimorphus, Chlorella spp., D. viridis, or D. tertiolecta.

[0388] In some instances the organism is a rhodophyte, chlorophyte, heterokontophyte, tribophyte, glaucophyte, chlorarachniophyte, euglenoid, haptophyte, cryptoronad, dinoflagellum, or phytoplankon.

[0389] In some instances a host organism is vascular and photosynthetic. Examples of vascular plants include, but are not limited to, angiosperms, gymnosperms, rhyniophytes, or other tracheophytes.

[0390] In some instances a host organism is non-vascular and photosynthetic. As used herein, the term “non-vascular photosynthetic organism,” refers to any macroscopic or microscopic organism, including, but not limited to, algae, cyanobacteria and photosynthetic bacteria, which does not have a vascular system such as that found in vascular plants. Examples of non-vascular photosynthetic organisms include bryophtyes, such as marchantiophytes or anthocerotophytes. In some instances the organism is a cyanobacteria. In some instances, the organism is algae (e.g., macroalgae or microalgae). The algae can be unicellular or multicellular algae. For example, the microalgae Chlamydomonas reinhardtii may be transformed with a vector, or a linearized portion thereof, encoding one or more proteins of interest (e.g., a protein involved in the isoprenoid biosynthesis pathway).

[0391] Methods for algal transformation are described in U.S. Provisional Patent Application No. 60/142,091. The methods of the present disclosure can be carried out using algae, for example, the microalga, C. reinhardtii. The use of microalgae to express a polypeptide or protein complex according to a method of the disclosure provides the advantage that large populations of the microalgae can be grown, including commercially (Cyanotech Corp.; Kailua-Kona HI), thus allowing for production and, if desired, isolation of large amounts of a desired product.

[0392] The vectors of the present disclosure may be capable of stable or transient transformation of multiple photosynthetic organisms, including, but not limited to, photosynthetic bacteria (including cyanobacteria), cyanophyta, prochlorophyta, rhodophyta, chlorophyta, pyrrophyta, heterokontophyta, tribophyta, glaucophyta, chlorarachniophytes, euglenophyta, euglenoids, haptophyta, chrysophyta (including diatoms), cryptophyta, cryptomonads, dinophyta, dinoflagellata, pyrmnesiophyta, bacillariophyta, xanthophyta, eustigmatophyta, raphidophyta, phaeophyta, and phytoplankton. Other vectors of the present disclosure are capable of stable or transient transformation of, for example, C. reinhardtii, N. oceania, N salina, D. salina, H. pluvalis, S. dimorphus, D. viridis, or D. tertiolecta.

[0393] Examples of appropriate hosts, include but are not limited to: bacterial cells, such as E. coli, Streptomyces, Salmonella typhimurium; fungal cells, such as yeast; insect cells, such as Drosophila S2 and Spodoptera Sf9; animal cells, such as CHO, COS or Bowes melanoma; adenoviruses; and plant cells. The selection of an appropriate host is deemed to be within the scope of those skilled in the art.

[0394] Polynucleotides selected and isolated as described herein are introduced into a suitable host cell. A suitable host cell is any cell which is capable of promoting recombination and/or reductive reassortment. The selected polynucleotides can be, for example, in a vector which includes appropriate control sequences. The host cell can be, for example, a higher eukaryotic cell, such as a mammalian cell, or a lower eukaryotic cell, such as a yeast cell, or the host cell can be a prokaryotic cell, such as a bacterial cell. Introduction of a construct (vector) into the host cell can be effected by, for example, calcium phosphate transfection, DEAE-Dextran mediated transfection, or electroporation.

[0395] Recombinant polypeptides, including protein complexes, can be expressed in plants, allowing for the production of crops of such plants and, therefore, the ability to conveniently produce large amounts of a desired product. Accordingly, the methods of the disclosure can be practiced using any plant, including, for example, microalga and macroalgae, (such as marine algae and seaweeds), as well as plants that grow in soil.

[0396] In one embodiment, the host cell is a plant. The term “plant” is used broadly herein to refer to a eukaryotic organism containing plastids, such as chloroplasts, and includes any such organism at any stage of development, or to part of a plant, including a plant cutting, a plant cell, a plant cell culture, a plant organ, a plant seed, and a plantlet. A plant cell is the structural and physiological unit of the plant, comprising a protoplast and a cell wall. A plant cell can be in the form of an isolated single cell or a cultured cell, or can be part of higher organized unit, for example, a plant tissue, plant organ, or plant. Thus, a plant cell can be a protoplast, a gamete producing cell, or a cell or collection of cells that can regenerate into a whole plant. As such, a seed, which comprises multiple plant cells and is capable of regenerating into a whole plant, is considered plant cell for purposes of this disclosure. A plant tissue or plant organ can be a seed, protoplast, callus, or any other groups of plant cells that is organized into a structural or functional unit. Particularly useful parts of a plant include harvestable parts and parts useful for propagation of progeny plants. A harvestable part of a plant can be any useful part of a plant, for example, flowers, pollen, seedlings, tubers, leaves, stems, fruit, seeds, and roots. A part of a plant useful for propagation includes, for example, seeds, fruits, cuttings, seedlings, tubers, and rootstocks.

[0397] A method of the disclosure can generate a plant containing genomic DNA (for example, a nuclear and/or plastid genomic DNA) that is genetically modified to contain a stably integrated polynucleotide (for example, as described in Hager and Bock, Appl. Microbiol. Biotechnol. 54:302-310, 2000). Accordingly, the present disclosure further provides a transgenic plant, e.g. C. reinhardtii, which comprises one or more chloroplasts containing a polynucleotide encoding one or more exogenous or endogenous polypeptides, including polypeptides that can allow for secretion of fuel products and/or fuel product precursors (e.g., isoprenoids, fatty acids, lipids, triglycerides). A photosynthetic organism of the present disclosure comprises at least one host cell that is modified to generate, for example, a fuel product or a fuel product precursor.

[0398] Some of the host organisms useful in the disclosed embodiments are, for example, are extremophiles, such as hyperthermophiles, psychrophiles, psychrotrophs, halophiles, barophiles and acidophiles. Some of the host organisms which may be used to practice the present disclosure are halophilic (e.g., Dunaliella salina, D. viridis, or D. tertiolecta). For example, D. salina can grow in ocean water and salt lakes (for example, salinity from 30-300 parts per thousand) and high salinity media (e.g., artificial seawater medium, seawater nutrient agar, brackish water medium, and seawater medium). In some embodiments of the disclosure, a host cell expressing a protein of the present disclosure can be grown in a liquid environment which is, for example, 0.1, 0.2, 0.3, 0.4, 0.5, 0.6, 0.7, 0.8, 0.9, 1.0, 1.1, 1.2, 1.3, 1.4, 1.5, 1.6, 1.7, 1.8, 1.9, 2.0, 2.1, 2.2, 2.3, 2.4, 2.5, 2.6, 2.7, 2.8, 2.9, 3.0, 3.1, 3.2, 3.3, 3.4, 3.5, 3.6, 3.7, 3.8, 3.9, 4.0, 4.1, 4.2, 4.3 molar or higher concentrations of sodium chloride. One of skill in the art will recognize that other salts (sodium salts, calcium salts, potassium salts, or other salts) may also be present in the liquid environments.

[0399] Where a halophilic organism is utilized for the present disclosure, it may be transformed with any of the vectors described herein. For example, D. salina may be transformed with a vector which is capable of insertion into the chloroplast or nuclear genome and which contains nucleic acids which encode a protein (e.g., an FPP synthase or a fusicoccadiene synthase). Transformed halophilic organisms may then be grown in high-saline environments (e.g., salt lakes, salt ponds, and high-saline media) to produce the products (e.g., lipids) of interest. Isolation of the products may involve removing a transformed organism from a high-saline environment prior to extracting the product from the organism. In instances where the product is secreted into the surrounding environment, it may be necessary to desalinate the liquid environment prior to any further processing of the product.

[0400] The present disclosure further provides compositions comprising a genetically modified host cell. A composition comprises a genetically modified host cell; and will in some embodiments comprise one or more further components, which components are selected based in part on the intended use of the genetically modified host cell. Suitable components include, but are not limited to, salts; buffers; stabilizers; protease-inhibiting agents; cell membrane- and/or cell wall-preserving compounds, e.g., glycerol and dimethylsulfoxide; and nutritional media appropriate to the cell.

[0401] For the production of a protein, for example, an isoprenoid or isoprenoid precursor compound, a host cell can be, for example, one that produces, or has been genetically modified to produce, one or more enzymes in a prenyl transferase pathway and/or a mevalonate pathway and/or an isoprenoid biosynthetic pathway. In some embodiments, the host cell is one that produces a substrate of a prenyl transferase, isoprenoid synthase or mevalonate pathway enzyme.

[0402] In some embodiments, a genetically modified host cell is a host cell that comprises an endogenous mevalonate pathway and/or isoprenoid biosynthetic pathway and/or prenyl transferase pathway. In other embodiments, a genetically modified host cell is a host cell that does not normally produce mevalonate or IPP via a mevalonate pathway, or FPP, GPP or GGPP via a prenyl transferase pathway, but has been genetically modified with one or more polynucleotides comprising nucleotide sequences encoding one or more mevalonate pathway, isoprenoid synthase pathway or prenyl transferase pathway enzymes (for example, as described in U.S. Patent Publication No. 2004/005678; U.S. Patent Publication No. 2003/0148479; and Martin et al. (2003) Natl. Biotech. 21(7):796-802).

[0403] Culturing of Cells or Organisms

[0404] An organism may be grown under conditions which permit photosynthesis, however, this is not a requirement (e.g., a host organism may be grown in the absence of light). In some instances, the host organism may be genetically modified in such a way that its photosynthetic capability is diminished or destroyed. In growth conditions where a host organism is not capable of photosynthesis (e.g., because of the absence of light and/or genetic modification), typically, the organism will be provided with the necessary nutrients to support growth in the absence of photosynthesis. For example, a culture medium in (or on) which an organism is grown, may be supplemented with any required nutrient, including an organic carbon source, nitrogen source, phosphorous source, vitamins, metals, lipids, nucleic acids, micronutrients, and/or an organism-specific requirement. Organic carbon sources include any source of carbon which the host organism is able to metabolize including, but not limited to, acetate, simple carbohydrates (e.g., glucose, sucrose, and lactose), complex carbohydrates (e.g., starch and glycogen), proteins, and lipids. One of skill in the art will recognize that not all organisms will be able to sufficiently metabolize a particular nutrient and that nutrient mixtures may need to be modified from one organism to another in order to provide the appropriate nutrient mix.

[0405] Optimal growth of organisms occurs usually at a temperature of about 20° C. to about 25° C., although some organisms can still grow at a temperature of up to about 35° C. Active growth is typically performed in liquid culture. If the organisms are grown in a liquid medium and are shaken or mixed, the density of the cells can be anywhere from about 1 to 5×10⁸ cells/ml at the stationary phase. For example, the density of the cells at the stationary phase for Chlamydomonas sp. can be about 1 to 5×10⁷ cells/ml; the density of the cells at the stationary phase for Nannochloropsis sp, can be about 1 to 5×10⁸ cells/ml; the density of the cells at the stationary phase for Scenedesmus sp. can be about 1 to 5×10⁷ cells/ml; and the density of the cells at the stationary phase for Chlorella sp. can be about 1 to 5×10⁸ cells/ml. Exemplary cell densities at the stationary phase are as follows: Chlamydomonas sp. can be about 1×10⁷ cells/ml; Nannochloropsis sp. can be about 1×10⁸ cells/ml; Scenedesmus sp. can be about 1×10⁷ cells/ml; and Chlorella sp. can be about 1×10⁸ cells/ml. An exemplary growth rate may yield, for example, a two to four fold increase in cells per day, depending on the growth conditions. In addition, doubling times for organisms can be, for example, 5 hours to 30 hours. The organism can also be grown on solid media, for example, media containing about 1.5% agar, in plates or in slants.

[0406] One source of energy is fluorescent light that can be placed, for example, at a distance of about 1 inch to about two feet from the organism. Examples of types of fluorescent lights includes, for example, cool white and daylight. Bubbling with air or CO₂ improves the growth rate of the organism. Bubbling with CO₂ can be, for example, at 1% to 5% CO₂. If the lights are turned on and off at regular intervals (for example, 12:12 or 14:10 hours of light:dark) the cells of some organisms will become synchronized.

[0407] Long term storage of organisms can be achieved by streaking them onto plates, sealing the plates with, for example, Parafilm™, and placing them in dim light at about 10° C. to about 18° C. Alternatively, organisms may be grown as streaks or stabs into agar tubes, capped, and stored at about 10° C. to about 18° C. Both methods allow for the storage of the organisms for several months.

[0408] For longer storage, the organisms can be grown in liquid culture to mid to late log phase and then supplemented with a penetrating cryoprotective agent like DMSO or MeOH, and stored at less than −130° C. An exemplary range of DMSO concentrations that can be used is 5 to 8%. An exemplary range of MeOH concentrations that can be used is 3 to 9%.

[0409] For longer Organisms can be grown on a defined minimal medium (for example, high salt medium (HSM), modified artificial sea water medium (MASM), or F/2 medium) with light as the sole energy source. In other instances, the organism can be grown in a medium (for example, tris acetate phosphate (TAP) medium), and supplemented with an organic carbon source. Organisms, such as algae, can grow naturally in fresh water or marine water. Culture media for freshwater algae can be, for example, synthetic media, enriched media, soil water media, and solidified media, such as agar. Various culture media have been developed and used for the isolation and cultivation of fresh water algae and are described in Watanabe. M. W. (2005). Freshwater Culture Media. In R. A. Andersen (Ed.), Algal Culturing Techniques (pp. 13-20). Elsevier Academic Press. Culture media for marine algae can be, for example, artificial seawater media or natural seawater media. Guidelines for the preparation of media are described in Harrison, P. J. and Berges, J. A. (2005). Marine Culture Media. In R. A. Andersen (Ed.), Algal Culturing Techniques (pp. 21-33). Elsevier Academic Press.

[0410] Organisms may be grown in outdoor open water, such as ponds, the ocean, seas, rivers, waterbeds, marshes, shallow pools, lakes, aqueducts, and reservoirs. When grown in water, the organism can be contained in a halo-like object comprised of lego-like particles. The halo-like object encircles the organism and allows it to retain nutrients from the water beneath while keeping it in open sunlight.

[0411] In some instances, organisms can be grown in containers wherein each container comprises one or two organisms, or a plurality of organisms. The containers can be configured to float on water. For example, a container can be filled by a combination of air and water to make the container and the organism(s) in it buoyant. An organism that is adapted to grow in fresh water can tins be grown in salt water (i.e., the ocean) and vice versa. This mechanism allows for automatic death of the organism if there is any damage to the container.

[0412] Culturing techniques for algae are well know to one of skill in the art and are described, for example, in Freshwater Culture Media. In R. A. Andersen (Ed.), Algal Culturing Techniques. Elsevier Academic Press.

[0413] Because photosynthetic organisms, for example, algae, require sunlight, CO₂ and water for growth, they can be cultivated in, for example, open ponds and lakes. However, these open systems are more vulnerable to contamination than a closed system. One challenge with using an open system is that the organism of interest may not grow as quickly as a potential invader. This becomes a problem when another organism invades the liquid environment in which the organism of interest is growing, and the invading organism has a faster growth rate and takes over the system.

[0414] In addition, in open systems there is less control over water temperature, CO₂ concentration, and lighting conditions. The growing season of the organism is largely dependent on location and, aside from tropical areas, is limited to the warmer months of the year. In addition, in an open system, the number of different organisms that can be grown is limited to those that are able to survive in the chosen location. An open system, however, is cheaper to set up and/or maintain than a closed system.

[0415] Another approach to growing an organism is to use a semi-closed system, such as covering the pond or pool with a structure, for example, a “greenhouse-type” structure. While this can result in a smaller system, it addresses many of the problems associated with an open system. The advantages of a semi-closed system are that it can allow for a greater number of different organisms to be grown, it can allow for an organism to be dominant over an invading organism by allowing the organism of interest to out compete the invading organism for nutrients required for its growth, and it can extend the growing season for the organism. For example, if the system is heated, the organism can grow year round.

[0416] A variation of the pond system is an artificial pond, for example, a raceway pond. In these ponds, the organism, water, and nutrients circulate around a “racetrack.” Paddlewheels provide constant motion to the liquid in the racetrack, allowing for the organism to be circulated back to the surface of the liquid at a chosen frequency. Paddlewheels also provide a source of agitation and oxygenate the system. These raceway ponds can be enclosed, for example, in a building or a greenhouse, or can be located outdoors.

[0417] Raceway ponds are usually kept shallow because the organism needs to be exposed to sunlight, and sunlight can only penetrate the pond water to a limited depth. The depth of a raceway pond can be, for example, about 4 to about 12 inches. In addition, the volume of liquid that can be contained in a raceway pond can be, for example, about 200 liters to about 600,000 liters.

[0418] The raceway ponds can be operated in a continuous manner, with, for example, CO₂ and nutrients being constantly fed to the ponds, while water containing the organism is removed at the other end.

[0419] If the raceway pond is placed outdoors, there are several different ways to address the invasion of an unwanted organism. For example, the pH or salinity of the liquid in which the desired organism is in can be such that the invading organism either slows down its growth or dies.

[0420] Also, chemicals can be added to the liquid, such as bleach, or a pesticide can be added to the liquid, such as glyphosate. In addition, the organism of interest can be genetically modified such that it is better suited to survive in the liquid environment. Any one or more of the above strategies can be used to address the invasion of an unwanted organism.

[0421] Alternatively, organisms, such as algae, can be grown in closed structures such as photobioreactors, where the environment is under stricter control than in open systems or semi-closed systems. A photobioreactor is a bioreactor which incorporates some type of light source to provide photonic energy input into the reactor. The term photobioreactor can refer to a system closed to the environment and having no direct exchange of gases and contaminants with the environment. A photobioreactor can be described as an enclosed, illuminated culture vessel designed for controlled biomass production of prototrophic liquid cell suspension cultures. Examples of photobioreactors include, for example, glass containers, plastic tubes, tanks, plastic sleeves, and bags. Examples of light sources that can be used to provide the energy required to sustain photosynthesis include, for example, fluorescent bulbs, LEDs, and natural sunlight. Because these systems are closed everything that the organism needs to grow (for example, carbon dioxide, nutrients, water, and light) must be introduced into the bioreactor.

[0422] Photobioreactors, despite the costs to set up and maintain them, have several advantages over open systems, they can, for example, prevent or minimize contamination, permit axenic organism cultivation of monocultures (a culture consisting of only one species of organism), offer better control over the culture conditions (for example, pH, light, carbon dioxide, and temperature), prevent water evaporation, lower carbon dioxide losses due to out gassing, and permit higher cell concentrations.

[0423] On the other hand, certain requirements of photobioreactors, such as cooling, mixing, control of oxygen accumulation and biofouling, make these systems more expensive to build and operate than open systems or semi-closed systems.

[0424] Photobioreactors can be set up to be continually harvested (as is with the majority of the larger volume cultivation systems), or harvested one batch at a time (for example, as with polyethlyene bag cultivation). A batch photobioreactor is set up with, for example, nutrients, an organism (for example, algae), and water, and the organism is allowed to grow until the batch is harvested. A continuous photobioreactor can be harvested, for example, either continually, daily, or at fixed time intervals.

[0425] High density photobioreactors are described in, for example, Lee, et al., Biotech. Bioengineering 44:1161-1167, 1994. Other types of bioreactors, such as those for sewage and waste water treatments, are described in, Sawayamra, et al., Appl. Micro. Biotech., 41:729-731, 1994. Additional examples of photobioreactors are described in, U.S. Appl. Pub., No. 2005/0260553, U.S. Pat. No. 5,958,761, and U.S. Pat. No. 6,083,740. Also, organisms, such as algae may be mass-cultured for the removal of heavy metals (for example, as described in Wilkinson, Biotech, Letters, 11:861-864, 1989), hydrogen (for example, as described in U.S. Patent Application Publication No. 2003/0162273), and pharmaceutical compounds from a water, soil, or other source or sample. Organisms can also be cultured in conventional fermentation bioreactors, which include, but are not limited to, batch, fed-batch, cell recycle, and continuous fermentors. Additional methods of culturing organisms and variations of the methods described herein are known to one of skill in the art.

[0426] Organisms can also be grown near ethanol production plants or other facilities or regions (e.g., cities and highways) generating CO₂. As such, the methods herein contemplate business methods for selling carbon credits to ethanol plants or other facilities or regions generating CO₂ while making fuels or fuel products by growing one or more of the organisms described herein near the ethanol production plant, facility, or region.

[0427] The organism of interest, grown in any of the systems described herein, can be, for example, continually harvested, or harvested one batch at a time.

[0428] CO₂ can be delivered to any of the systems described herein, for example, by bubbling in CO₂ from under the surface of the liquid containing the organism. Also, sparges can be used to inject CO₂ into the liquid. Spargers are, for example, porous disc or tube assemblies that are also referred to as Bubblers, Carbonators, Aerators, Porous Stones and Diffusers.

[0429] Nutrients that can be used in the systems described herein include, for example, nitrogen (in the form of NO₃⁻ or NH₄⁺), phosphorus, and trace metals (Fe, Mg, K, Ca, Co, Cu, Mn, Mo, Zn, V, and B). The nutrients can come, for example, in a solid form or in a liquid form. If the nutrients are in a solid form they can be mixed with, for example, fresh or salt water prior to being delivered to the liquid containing the organism, or prior to being delivered to a photobioreactor.

[0430] Organisms can be grown in cultures, for example large scale cultures, where large scale cultures refers to growth of cultures in volumes of greater than about 6 liters, or greater than about 10 liters, or greater than about 20 liters. Large scale growth can also be growth of cultures in volumes of 50 liters or more, 100 liters or more, or 200 liters or more. Large scale growth can be growth of cultures in, for example, ponds, containers, vessels, or other areas, where the pond, container, vessel, or area that contains the culture is for example, at lease 5 square meters, at least 10 square meters, at least 200 square meters, at least 500 square meters, at least 1,500 square meters, at least 2,500 square meters, in area, or greater.

[0431] Chlamydomonas sp., Nannochloropsis sp., Scenedesmus sp., and Chlorella sp. are exemplary algae that can be cultured as described herein and can grow under a wide array of conditions.

[0432] One organism that can be cultured as described herein is a commonly used laboratory species C. reinhardtii. Cells of this species are haploid, and can grow on a simple medium of inorganic salts, using photosynthesis to provide energy. This organism can also grow in total darkness if acetate is provided as a carbon source. C. reinhardtii can be readily grown at room temperature under standard fluorescent lights. In addition, the cells can be synchronized by placing them on a light-dark cycle. Other methods of culturing C. reinhardtii cells are known to one of skill in the art.

[0433] Polynucleotides and Polypeptides

[0434] In addition to being genetically engineered to be, for example, salt tolerant, herbicide resistant, or sodium hypochlorite resistant, as compared to an unengineered organism, the host cells or host organism can be further modified to express an exogenous or endogenous protein, for example, a protein involved in the isoprenoid biosynthetic pathway or a protein involved in the accumulation and/or secretion of fatty acids, glycerol lipids, or oils.

[0435] Also provided are isolated polynucleotides encoding a protein, for example, an FPP synthase, described herein. As used herein “isolated polynucleotide” means a polynucleotide that is free of one or both of the nucleotide sequences which flank the polynucleotide in the naturally-occurring genome of the organism from which the polynucleotide is derived. The term includes, for example, a polynucleotide or fragment thereof that is incorporated into a vector or expression cassette; into an autonomously replicating plasmid or virus; into the genomic DNA of a prokaryote or eukaryote; or that exists as a separate molecule independent of other polynucleotides. It also includes a recombinant polynucleotide that is part of a hybrid polynucleotide, for example, one encoding a polypeptide sequence.

[0436] The proteins of the present disclosure can be made by any method known in the art. The protein may be synthesized using either solid-phase peptide synthesis or by classical solution peptide synthesis also known as liquid-phase peptide synthesis. Using Val-Pro-Pro, Enalapril and Lisinopril as starting templates, several series of peptide analogs such as X-Pro-Pro, X-Ala-Pro, and X-Lys-Pro, wherein X represents any amino acid residue, may be synthesized using solid-phase or liquid-phase peptide synthesis. Methods for carrying out liquid phase synthesis of libraries of peptides and oligonucleotides coupled to a soluble oligomeric support have also been described. Bayer, Ernst and Mutter, Manfred, Nature 237:512-513 (1972); Bayer, Ernst, et al., J. Am. Chem. Soc. 96:7333-7336 (1974); Bonora, Gian Maria, et al., Nucleic Acids Res. 18:3155-3159 (1990). Liquid phase synthetic methods have the advantage over solid phase synthetic methods in that liquid phase synthesis methods do not require a structure present on a first reactant which is suitable for attaching the reactant to the solid phase. Also, liquid phase synthesis methods do not require avoiding chemical conditions which may cleave the bond between the solid phase and the first reactant (or intermediate product). In addition, reactions in a homogeneous solution may give better yields and more complete reactions than those obtained in heterogeneous solid phase/liquid phase systems such as those present in solid phase synthesis.

[0437] In oligomer-supported liquid phase synthesis the growing product is attached to a large soluble polymeric group. The product from each step of the synthesis can then be separated from unreacted reactants based on the large difference in size between the relatively large polymer-attached product and the unreacted reactants. This permits reactions to take place in homogeneous solutions, and eliminates tedious purification steps associated with traditional liquid phase synthesis. Oligomer-supported liquid phase synthesis has also been adapted to automatic liquid phase synthesis of peptides. Bayer, Ernst, et al., Peptides: Chemistry, Structure, Biology, 426-432.

[0438] For solid-phase peptide synthesis, the procedure entails the sequential assembly of the appropriate amino acids into a peptide of a desired sequence while the end of the growing peptide is linked to an insoluble support. Usually, the carboxyl terminus of the peptide is linked to a polymer from which it can be liberated upon treatment with a cleavage reagent. In a common method, an amino acid is bound to a resin particle, and the peptide generated in a stepwise manner by successive additions of protected amino acids to produce a chain of amino acids. Modifications of the technique described by Merrifield are commonly used. See, e.g., Merrifield, J. Am. Chem. Soc. 96: 2989-93 (1964). In an automated solid-phase method, peptides are synthesized by loading the carboxy-terminal amino acid onto an organic linker (e.g., PAM, 4-oxymethylphenylacetamidomethyl), which is covalently attached to an insoluble polystyrene resin cross-linked with divinyl benzene. The terminal amine may be protected by blocking with t-butyloxycarbonyl. Hydroxyl- and carboxyl-groups are commonly protected by blocking with O-benzyl groups. Synthesis is accomplished in an automated peptide synthesizer, such as that available from Applied Biosystems (Foster City, Calif.). Following synthesis, the product may be removed from the resin. The blocking groups are removed by using hydrofluoric acid or trifluoromethyl sulfonic acid according to established methods. A routine synthesis may produce 0.5 mmole of peptide resin. Following cleavage and purification, a yield of approximately 60 to 70% is typically produced. Purification of the product peptides is accomplished by, for example, crystallizing the peptide from an organic solvent such as methyl-butyl ether, then dissolving in distilled water, and using dialysis (if the molecular weight of the subject peptide is greater than about 500 daltons) or reverse high pressure liquid chromatography (e.g., using a C¹⁸ column with 0.1% trifluoroacetic acid and acetonitrile as solvents) if the molecular weight of the peptide is less than 500 daltons. Purified peptide may be lyophilized and stored in a dry state until use. Analysis of the resulting peptides may be accomplished using the common methods of analytical high pressure liquid chromatography (HPLC) and electrospray mass spectrometry (ES-MS).

[0439] In other cases, a protein, for example, a protein involved in the isoprenoid biosynthesis pathway or in fatty acid synthesis, is produced by recombinant methods. For production of any of the proteins described herein, host cells transformed with an expression vector containing the polynucleotide encoding such a protein can be used. The host cell can be a higher eukaryotic cell, such as a mammalian cell, or a lower eukaryotic cell such as a yeast or algal cell, or the host can be a prokaryotic cell such as a bacterial cell. Introduction of the expression vector into the host cell can be accomplished by a variety of methods including calcium phosphate transfection, DEAE-dextran mediated transfection, polybrene, protoplast fusion, liposomes, direct microinjection into the nuclei, scrape loading, biolistic transformation and electroporation. Large scale production of proteins from recombinant organisms is a well established process practiced on a commercial scale and well within the capabilities of one skilled in the art.

[0440] It should be recognized that the present disclosure is not limited to transgenic cells, organisms, and plastids containing a protein or proteins as disclosed herein, but also encompasses such cells, organisms, and plastids transformed with additional nucleotide sequences encoding enzymes involved in fatty acid synthesis. Thus, some embodiments involve the introduction of one or more sequences encoding proteins involved in fatty acid synthesis in addition to a protein disclosed herein. For example, several enzymes in a fatty acid production pathway may be linked, either directly or indirectly, such that products produced by one enzyme in the pathway, once produced, are in close proximity to the next enzyme in the pathway. These additional sequences may be contained in a single vector either operatively linked to a single promoter or linked to multiple promoters, e.g. one promoter for each sequence. Alternatively, the additional coding sequences may be contained in a plurality of additional vectors. When a plurality of vectors are used, they can be introduced into the host cell or organism simultaneously or sequentially.

[0441] Additional embodiments provide a plastid, and in particular a chloroplast, transformed with a polynucleotide encoding a protein of the present disclosure. The protein may be introduced into the genome of the plastid using any of the methods described herein or otherwise known in the art. The plastid may be contained in the organism in which it naturally occurs. Alternatively, the plastid may be an isolated plastid, that is, a plastid that has been removed from the cell in which it normally occurs. Methods for the isolation of plastids are known in the art and can be found, for example, in Maliga et al., Methods in Plant Molecular Biology, Cold Spring Harbor Laboratory Press, 1995; Gupta and Singh, J. Biosci., 21:819 (1996); and Camara et al. Plant Physiol., 73:94 (1983). The isolated plastid transformed with a protein of the present disclosure can be introduced into a host cell. The host cell can be one that naturally contains the plastid or one in which the plastid is not naturally found.

[0442] Also within the scope of the present disclosure are artificial plastid genomes, for example chloroplast genomes, that contain nucleotide sequences encoding any one or more of the proteins of the present disclosure. Methods for the assembly of artificial plastid genomes can be found in co-pending U.S. patent application Ser. No. 12/287,230 filed Oct. 6, 2008, published as U.S. Publication No. 2009/0123977 on May 14, 2009, and U.S. patent application Ser. No. 12/384,893 filed Apr. 8, 2009, published as U.S. Publication No. 2009/0269816 on Oct. 29, 2009, each of which is incorporated by reference in its entirety.

[0443] Introduction of Polynucleotide into a Host Organism or Cell

[0444] To generate a genetically modified host cell, a polynucleotide, or a polynucleotide cloned into a vector, is introduced stably or transiently into a host cell, using established techniques, including, but not limited to, electroporation, calcium phosphate precipitation, DEAE-dextran mediated transfection, and liposome-mediated transfection. For transformation, a polynucleotide of the present disclosure will generally further include a selectable marker, e.g., any of several well-known selectable markers such as neomycin resistance, ampicillin resistance, tetracycline resistance, chloramphenicol resistance, and kanamycin resistance.

[0445] A polynucleotide or recombinant nucleic acid molecule described herein, can be introduced into a cell (e.g., alga cell) using any method known in the art. A polynucleotide can be introduced into a cell by a variety of methods, which are well known in the art and selected, in part, based on the particular host cell. For example, the polynucleotide can be introduced into a cell using a direct gene transfer method such as electroporation or microprojectile mediated (biolistic) transformation using a particle gun, or the “glass bead method,” or by pollen-mediated transformation, liposome-mediated transformation, transformation using wounded or enzyme-degraded immature embryos, or wounded or enzyme-degraded embryogenic callus (for example, as described in Potrykus, Ann. Rev. Plant. Physiol. Plant Mol. Biol. 42:205-225, 1991).

[0446] As discussed above, microprojectile mediated transformation can be used to introduce a polynucleotide into a cell (for example, as described in Klein et al., Nature 327:70-73, 1987). This method utilizes microprojectiles such as gold or tungsten, which are coated with the desired polynucleotide by precipitation with calcium chloride, spermidine or polyethylene glycol. The microprojectile particles are accelerated at high speed into a cell using a device such as the BIOLISTIC PD-1000 particle gun (BioRad; Hercules Calif.). Methods for the transformation using biolistic methods are well known in the art (for example, as described in Christou, Trend in Plant Science 1:423-431, 1996). Microprojectile mediated transformation has been used, for example, to generate a variety of transgenic plant species, including cotton, tobacco, corn, hybrid poplar and papaya. Important cereal crops such as wheat, oat, barley, sorghum and rice also have been transformed using microprojectile mediated delivery (for example, as described in Duan et al., Nature Biotech. 14:494-498, 1996; and Shimamoto, Curr. Opin. Biotech. 5:158-162, 1994). The transformation of most dicotyledonous plants is possible with the methods described above. Transformation of monocotyledonous plants also can be transformed using, for example, biolistic methods as described above, protoplast transformation, electroporation of partially permeabilized cells, introduction of DNA using glass fibers, and the glass bead agitation method.

[0447] The basic techniques used for transformation and expression in photosynthetic microorganisms are similar to those commonly used for E. coli, Saccharomyces cerevisiae and other species, Transformation methods customized for a photosynthetic microorganisms, e.g., the chloroplast of a strain of algae, are known in the art. These methods have been described in a number of texts for standard molecular biological manipulation (see Packer & Glaser, 1988, “Cyanobacteria”, Meth. Enzymol., Vol. 167; Weissbach & Weissbach, 1988, “Methods for plant molecular biology,” Academic Press, New York, Sambrook, Fritsch & Maniatis, 1989, “Molecular Cloning: A laboratory manual,” 2nd edition Cold Spring Harbor Laboratory Press, Cold Spring Harbor, N.Y.; and Clark M S, 1997, Plant Molecular Biology, Springer, N.Y.). These methods include, for example, biolistic devices (See, for example, Sanford, Trends In Biotech. (1988) δ: 299-302, U.S. Pat. No. 4,945,050; electroporation (Fromm et al., Proc. Nat'l. Acad. Sci. (USA) (1985) 82: 5824-5828); use of a laser beam, electroporation, microinjection or any other method capable of introducing DNA into a host cell.

[0448] Plastid transformation is a routine and well known method for introducing a polynucleotide into a plant cell chloroplast (see U.S. Pat. Nos. 5,451,513, 5,545,817, and 5,545,818; WO 95/16783; McBride et al., Proc. Natl. Acad. Sci., USA 91:7301-7305, 1994). In some embodiments, chloroplast transformation involves introducing regions of chloroplast DNA flanking a desired nucleotide sequence, allowing for homologous recombination of the exogenous DNA into the target chloroplast genome. In some instances one to 1.5 kb flanking nucleotide sequences of chloroplast genomic DNA may be used. Using this method, point mutations in the chloroplast 16S rRNA and rps12 genes, which confer resistance to spectinomycin and streptomycin, can be utilized as selectable markers for transformation (Svab et al., Proc. Natl. Acad. Sci., USA 87:8526-8530, 1990), and can result in stable homoplasmic transformants, at a frequency of approximately one per 100 bombardments of target leaves.

[0449] A further refinement in chloroplast transformation/expression technology that facilitates control over the timing and tissue pattern of expression of introduced DNA coding sequences in plant plastid genomes has been described in PCT International Publication WO 95/16783 and U.S. Pat. No. 5,576,198. This method involves the introduction into plant cells of constructs for nuclear transformation that provide for the expression of a viral single subunit RNA polymerase and targeting of this polymerase into the plastids via fusion to a plastid transit peptide. Transformation of plastids with DNA constructs comprising a viral single subunit RNA polymerase-specific promoter specific to the RNA polymerase expressed from the nuclear expression constructs operably linked to DNA coding sequences of interest permits control of the plastid expression constructs in a tissue and/or developmental specific manner in plants comprising both the nuclear polymerase construct and the plastid expression constructs. Expression of the nuclear RNA polymerase coding sequence can be placed under the control of either a constitutive promoter, or a tissue- or developmental stage-specific promoter, thereby extending this control to the plastid expression construct responsive to the plastid-targeted, nuclear-encoded viral RNA polymerase.

[0450] When nuclear transformation is utilized, the protein can be modified for plastid targeting by employing plant cell nuclear transformation constructs wherein DNA coding sequences of interest are fused to any of the available transit peptide sequences capable of facilitating transport of the encoded enzymes into plant plastids, and driving expression by employing an appropriate promoter. Targeting of the protein can be achieved by fusing DNA encoding plastid, e.g., chloroplast, leucoplast, amyloplast, etc., transit peptide sequences to the 5′ end of DNAs encoding the enzymes. The sequences that encode a transit peptide region can be obtained, for example, from plant nuclear-encoded plastid proteins, such as the small subunit (SSU) of ribulose bisphosphate carboxylase, EPSP synthase, plant fatty acid biosynthesis related genes including fatty acyl-ACP thioesterases, acyl carrier protein (ACP), stearoyl-ACP desaturase, β-ketoacyl-ACP synthase and acyl-ACP thioesterase, or LHCPII genes, etc. Plastid transit peptide sequences can also be obtained from nucleic acid sequences encoding carotenoid biosynthetic enzymes, such as GGPP synthase, phytoene synthase, and phytoene desaturase. Other transit peptide sequences are disclosed in Von Heijne et al. (1991) Plant Mol. Biol. Rep. 9: 104; Clark et al. (1989) J. Biol. Chem. 264: 17544; della-Cioppa et al. (1987) Plant Physiol. 84: 965; Romer et al. (1993) Biochem. Biophys. Res. Commun. 196: 1414; and Shah et al. (1986) Science 233: 478. Another transit peptide sequence is that of the intact ACCase from Chlamydomonas (genbank EDO96563, amino acids 1-33). The encoding sequence for a transit peptide effective in transport to plastids can include all or a portion of the encoding sequence for a particular transit peptide, and may also contain portions of the mature protein encoding sequence associated with a particular transit peptide. Numerous examples of transit peptides that can be used to deliver target proteins into plastids exist, and the particular transit peptide encoding sequences useful in the present disclosure are not critical as long as delivery into a plastid is obtained. Proteolytic processing within the plastid then produces the mature enzyme. This technique has proven successful with enzymes involved in polyhydroxyalkanoate biosynthesis (Nawrath et al. (1994) Proc. Natl. Acad. Sci. USA 91: 12760), and neomycin phosphotransferase II (NPT-II) and CP4 EPSPS (Padgette et al. (1995) Crop Sci. 35: 1451), for example.

[0451] Of interest are transit peptide sequences derived from enzymes known to be imported into the leucoplasts of seeds. Examples of enzymes containing useful transit peptides include those related to lipid biosynthesis (e.g., subunits of the plastid-targeted dicot acetyl-CoA carboxylase, biotin carboxylase, biotin carboxyl carrier protein, α-carboxy-transferase, and plastid-targeted monocot multifunctional acetyl-CoA carboxylase (Mw, 220,000); plastidic subunits of the fatty acid synthase complex (e.g., acyl carrier protein (ACP), malonyl-ACP synthase, KASI, KASII, and KASIII); steroyl-ACP desaturase; thioesterases (specific for short, medium, and long chain acyl ACP); plastid-targeted acyl transferases (e.g., glycerol-3-phosphate and acyl transferase); enzymes involved in the biosynthesis of aspartate family amino acids; phytoene synthase; gibberellic acid biosynthesis (e.g., ent-kaurene synthases 1 and 2); and carotenoid biosynthesis (e.g., lycopene synthase).

[0452] Nuclear transformation of eukaryotic algal cells can be by microprojectile mediated transformation, or can be by protoplast transformation, electroporation, introduction of DNA using glass fibers, or the glass bead agitation method, as nonlimiting examples (Kindle, Proc. Natl. Acad. Sciences USA 87: 1228-1232 (1990); Shimogawara et al. Genetics 148: 1821-1828 (1998)). Markers for nuclear transformation of algae include, without limitation, markers for rescuing auxotrophic strains (e.g., NIT1 and ARG7 in Chlamydomonas; Kindle et al. J. Cell Biol. 109: 2589-2601 (1989), Debuchy et al. EMBO J. 8: 2803-2809 (1989)), as well as dominant selectable markers (e.g., CRY1, aada; Nelson et al. Mol. Cellular. Biol. 14: 4011-4019 (1994), Cerutti et al. Genetics 145: 97-110 (1997)). In some embodiments, the presence of the knock out is used as a selectable marker for transformants. A knock out sequence can in some embodiments be co-transformed with a second sequence encoding a protein to be produced by the alga (for example, a therapeutic protein, industrial enzyme) or a protein that promotes or enhances production of a commercial, therapeutic, or nutritional product. The second sequence is in some embodiments provided on the same nucleic acid construct as the knock out sequence for transformation into the alga, in which the success of the knock out sequence in activating the gene of interest is used as the selectable marker.

[0453] In some embodiments, an alga is transformed with a nucleic acid which encodes a protein of interest, for example, a prenyl transferase, an isoprenoid synthase, or an enzyme capable of converting a precursor into a fuel product or a precursor of a fuel product (e.g., an isoprenoid or fatty acid).

[0454] In one embodiment, a transformation may introduce a nucleic acid into a plastid of the host alga (e.g., chloroplast). In another embodiments a transformation may introduce a nucleic acid into the nuclear genome of the host alga. In still another embodiment, a transformation may introduce nucleic acids into both the nuclear genome and into a plastid.

[0455] Transformed cells can be plated on selective media following introduction of exogenous nucleic acids. This method may also comprise several steps for screening. A screen of primary transformants can be conducted to determine which clones have proper insertion of the exogenous nucleic acids. Clones which show the proper integration may be propagated and re-screened to ensure genetic stability. Such methodology ensures that the transformants contain the genes of interest. In many instances, such screening is performed by polymerase chain reaction (PCR); however, any other appropriate technique known in the art may be utilized. Many different methods of PCR are known in the art (e.g., nested PCR, real time PCR). For any given screen, one of skill in the art will recognize that PCR components may be varied to achieve optimal screening results. For example, magnesium concentration may need to be adjusted upwards when PCR is performed on disrupted alga cells to which (which chelates magnesium) is added to chelate toxic metals. Following the screening for clones with the proper integration of exogenous nucleic acids, clones can be screened for the presence of the encoded protein(s) and/or products. Protein expression screening can be performed by Western blot analysis and/or enzyme activity assays. Transporter and/or product screening may be performed by any method known in the art, for example ATP turnover assay, substrate transport assay, HPLC or gas chromatography.

[0456] The expression of the protein or enzyme can be accomplished by inserting a polynucleotide sequence (gene) encoding the protein or enzyme into the chloroplast or nuclear genome of a microalgae. The modified strain of microalgae can be made homoplasmic to ensure that the polynucleotide will be stably maintained in the chloroplast genome of all descendents. A microalga is homoplasmic for a gene when the inserted gene is present in all copies of the chloroplast genome, for example, it is apparent to one of skill in the art that a chloroplast may contain multiple copies of its genome, and therefore, the term “homoplasmic” or “homoplasmy” refers to the state where all copies of a particular locus of interest are substantially identical. Plastid expression, in which genes are inserted by homologous recombination into all of the several thousand copies of the circular plastid genome present in each plant cell, takes advantage of the enormous copy number advantage over nuclear-expressed genes to permit expression levels that can readily exceed 10% or more of the total soluble plant protein. The process of determining the plasmic state of an organism of the present disclosure involves screening transformants for the presence of exogenous nucleic acids and the absence of wild-type nucleic acids at a given locus of interest.

[0457] Vectors

[0458] Construct, vector and plasmid are used interchangeably throughout the disclosure. Nucleic acids encoding the proteins described herein, can be contained in vectors, including cloning and expression vectors. A cloning vector is a self-replicating DNA molecule that serves to transfer a DNA segment into a host cell. Three common types of cloning vectors are bacterial plasmids, phages, and other viruses. An expression vector is a cloning vector designed so that a coding sequence inserted at a particular site will be transcribed and translated into a protein. Both cloning and expression vectors can contain nucleotide sequences that allow the vectors to replicate in one or more suitable host cells. In cloning vectors, this sequence is generally one that enables the vector to replicate independently of the host cell chromosomes, and also includes either origins of replication or autonomously replicating sequences.

[0459] In some embodiments, a polynucleotide of the present disclosure is cloned or inserted into an expression vector using cloning techniques know to one of skill in the art. The nucleotide sequences may be inserted into a vector by a variety of methods. In the most common method the sequences are inserted into an appropriate restriction endonuclease site(s) using procedures commonly known to those skilled in the art and detailed in, for example, Sambrook et al., Molecular Cloning, A Laboratory Manual, 2nd Ed., Cold Spring Harbor Press, (1989) and Ausubel et al., Short Protocols in Molecular Biology, 2nd Ed., John Wiley & Sons (1992).

[0460] Suitable expression vectors include, but are not limited to, baculovirus vectors, bacteriophage vectors, plasmids, phagemids, cosmids, fosmids, bacterial artificial chromosomes, viral vectors (e.g. viral vectors based on vaccinia virus, poliovirus, adenovirus, adeno-associated virus, SV40, and herpes simplex virus), PI-based artificial chromosomes, yeast plasmids, yeast artificial chromosomes, and any other vectors specific for specific hosts of interest (such as E coli and yeast). Thus, for example, a polynucleotide encoding an FPP synthase, can be inserted into anyone of a variety of expression vectors that are capable of expressing the enzyme. Such vectors can include, for example, chromosomal, nonchromosomal and synthetic DNA sequences.

[0461] Suitable expression vectors include chromosomal, non-chromosomal and synthetic DNA sequences, for example, SV 40 derivatives; bacterial plasmids; phage DNA; baculovirus; yeast plasmids; vectors derived from combinations of plasmids and phage DNA; and viral DNA such as vaccinia, adenovirus, fowl pox virus, and pseudorabies. In addition, any other vector that is replicable and viable in the host may be used. For example, vectors such as Ble2A, Arg7/2A, and SEnuc357 can be used for the expression of a protein.

[0462] Numerous suitable expression vectors are known to those of skill in the art. The following vectors are provided by way of example; for bacterial host cells: pQE vectors (Qiagen), pBluescript plasmids, pNH vectors, lambda-ZAP vectors (Stratagene), pTrc99a, pKK223-3, pDR540, and pRIT2T (Pharmacia); for eukaryotic host cells: pXT1, pSG5 (Stratagene), pSVK3, pBPV, pMSG, pET21a-d(+) vectors (Novagen), and pSVLSV40 (Pharmacia). However, any other plasmid or other vector may be used so long as it is compatible with the host cell.

[0463] The expression vector, or a linearized portion thereof, can encode one or more exogenous or endogenous nucleotide sequences. Examples of exogenous nucleotide sequences that can be transformed into a host include genes from bacteria, fungi, plants, photosynthetic bacteria or other algae. Examples of other types of nucleotide sequences that can be transformed into a host, include, but are not limited to, transporter genes, isoprenoid producing genes, genes which encode for proteins which produce isoprenoids with two phosphates (e.g., GPP synthase and/or FPP synthase), genes which encode for proteins which produce fatty acids, lipids, or triglycerides, for example, ACCases, endogenous promoters, and 5′ UTRs from the psbA, atpA, or rbcL genes. In some instances, an exogenous sequence is flanked by two homologous sequences.

[0464] Homologous sequences are, for example, those that have at least 50%, at least 60%, at least 70%, at least 80%, at least 90%, at least 95%, at least 98%, or at least at least 99% sequence identity to a reference amino acid sequence or nucleotide sequence, for example, the amino acid sequence or nucleotide sequence that is found naturally in the host cell. The first and second homologous sequences enable recombination of the exogenous or endogenous sequence into the genome of the host organism. The first and second homologous sequences can be at least 100, at least 200, at least 300, at least 400, at least 500, or at least 1500 nucleotides in length.

[0465] The polynucleotide sequence may comprise nucleotide sequences that are codon biased for expression in the organism being transformed. The skilled artisan is well aware of the “codon-bias” exhibited by a specific host cell in usage of nucleotide codons to specify a given amino acid. Without being bound by theory, by using a host cell's preferred codons, the rate of translation may be greater. Therefore, when synthesizing a gene for improved expression in a host cell, it may be desirable to design the gene such that its frequency of codon usage approaches the frequency of preferred codon usage of the host cell. In some organisms, codon bias differs between the nuclear genome and organelle genomes, thus, codon optimization or biasing may be performed for the target genome (e.g., nuclear codon biased or chloroplast codon biased). In some embodiments, codon biasing occurs before mutagenesis to generate a polypeptide. In other embodiments, codon biasing occurs after mutagenesis to generate a polynucleotide. In yet other embodiments, codon biasing occurs before mutagenesis as well as after mutagenesis. Codon bias is described in detail herein.

[0466] In some embodiments, a vector comprises a polynucleotide operably linked to one or more control elements, such as a promoter and/or a transcription terminator. A nucleic acid sequence is operably linked when it is placed into a functional relationship with another nucleic acid sequence. For example, DNA for a presequence or secretory leader is operatively linked to DNA for a polypeptide if it is expressed as a preprotein which participates in the secretion of the polypeptide; a promoter is operably linked to a coding sequence if it affects the transcription of the sequence; or a ribosome binding site is operably linked to a coding sequence if it is positioned so as to facilitate translation. Generally, operably linked sequences are contiguous and, in the case of a secretory leader, contiguous and in reading phase. Linking is achieved by ligation at restriction enzyme sites. If suitable restriction sites are not available, then synthetic oligonucleotide adapters or linkers can be used as is known to those skilled in the art. Sambrook et al., Molecular Cloning, A Laboratory Manual, 2^{nd} Ed., Cold Spring Harbor Press, (1989) and Ausubel et al., Short Protocols in Molecular Biology, 2^{nd} Ed., John Wiley & Sons (1992).

[0467] A vector in some embodiments provides for amplification of the copy number of a polynucleotide. A vector can be, for example, an expression vector that provides for expression of an ACCase, a prenyl transferase, an isoprenoid synthase, or a mevalonate synthesis enzyme in a host cell, e.g., a prokaryotic host cell or a eukaryotic host cell.

[0468] A polynucleotide or polynucleotides can be contained in a vector or vectors. For example, where a second (or more) nucleic acid molecule is desired, the second nucleic acid molecule can be contained in a vector, which can, but need not be, the same vector as that containing the first nucleic acid molecule. The vector can be any vector useful for introducing a polynucleotide into a genome and can include a nucleotide sequence of genomic DNA (e.g., nuclear or plastid) that is sufficient to undergo homologous recombination with genomic DNA, for example, a nucleotide sequence comprising about 400 to about 1500 or more substantially contiguous nucleotides of genomic DNA,

[0469] A regulatory or control element, as the term is used herein, broadly refers to a nucleotide sequence that regulates the transcription or translation of a polynucleotide or the localization of a polypeptide to which it is operatively linked. Examples include, but are not limited to, an RBS, a promoter, enhancer, transcription terminator, an initiation (start) codon, a splicing signal for intron excision and maintenance of a correct reading frame, a STOP codon, an amber or ochre codon, and an IRES. A regulatory element can include a promoter and transcriptional and translational stop signals. Elements may be provided with linkers for the purpose of introducing specific restriction sites facilitating ligation of the control sequences with the coding region of a nucleotide sequence encoding a polypeptide. Additionally, a sequence comprising a cell compartmentalization signal (i.e., a sequence that targets a polypeptide to the cytosol, nucleus, chloroplast membrane or cell membrane) can be attached to the polynucleotide encoding a protein of interest. Such signals are well known in the art and have been widely reported (see, e.g., U.S. Pat. No. 5,776,689).

[0470] Promoters are untranslated sequences located generally 100 to 1000 base pairs (bp) upstream from the start codon of a structural gene that regulate the transcription and translation of nucleic acid sequences under their control.

[0471] Promoters useful for the present disclosure may come from any source (e.g., viral, bacterial, fungal, protist, and animal). The promoters contemplated herein can be specific to photosynthetic organisms, non-vascular photosynthetic organisms, and vascular photosynthetic organisms (e.g., algae, flowering plants). In some instances, the nucleic acids above are inserted into a vector that comprises a promoter of a photosynthetic organism, e.g., algae. The promoter can be a constitutive promoter or an inducible promoter. A promoter typically includes necessary nucleic acid sequences near the start site of transcription, (e.g., a TATA element). Common promoters used in expression vectors include, but are not limited to, LTR or SV40 promoter, the E. coli lac or trp promoters, and the phage lambda PL promoter. Other promoters known to control the expression of genes in prokaryotic or eukaryotic cells can be used and are known to those skilled in the art. Expression vectors may also contain a ribosome binding site for translation initiation, and a transcription terminator. The vector may also contain sequences useful for the amplification of gene expression.

[0472] A “constitutive” promoter is a promoter that is active under most environmental and developmental conditions. An “inducible” promoter is a promoter that is active under controllable environmental or developmental conditions. Examples of inducible promoters/regulatory elements include, for example, a nitrate-inducible promoter (for example, as described in Bock et al, Plant Mol. Biol. 17:9 (1991)), or a light-inducible promoter, (for example, as described in Feinbaum et al, Mol. Gen. Genet. 226:449 (1991); and Lam and Chua, Science 248:471 (1990)), or a heat responsive promoter (for example, as described in Muller et al., Gene 111: 165-73 (1992)).

[0473] In many embodiments, a polynucleotide of the present disclosure includes a nucleotide sequence encoding a protein or enzyme of the present disclosure, where the nucleotide sequence encoding the polypeptide is operably linked to an inducible promoter. Inducible promoters are well known in the art. Suitable inducible promoters include, but are not limited to, the pL of bacteriophage λ; Placo; Ptrp; Ptac (Ptrp-lac hybrid promoter); an isopropyl-beta-D-thiogalactopyranoside (IPTG)-inducible promoter, e.g., a lacZ promoter; a tetracycline-inducible promoter; an arabinose inducible promoter, e.g., P_{BAD} (for example, as described in Guzman et al. (1995) J. Bacteriol. 177:4121-4130); a xylose-inducible promoter, e.g., Pxy1 (for example, as described in Kim et al. (1996) Gene 181:71-76); a GAL1 promoter; a tryptophan promoter; a lac promoter; an alcohol-inducible promoter, e.g., a methanol-inducible promoter, an ethanol-inducible promoter; a raffinose-inducible promoter; and a heat-inducible promoter, e.g., heat inducible lambda P_{L} promoter and a promoter controlled by a heat-sensitive repressor (e.g., C1857-repressed lambda-based expression vectors; for example, as described in Hoffmann et al. (1999) FEMS Microbiol Lett. 177(2):327-34).

[0474] In many embodiments, a polynucleotide of the present disclosure includes a nucleotide sequence encoding a protein or enzyme of the present disclosure, where the nucleotide sequence encoding the polypeptide is operably linked to a constitutive promoter. Suitable constitutive promoters for use in prokaryotic cells are known in the art and include, but are not limited to, a sigma70 promoter, and a consensus sigma70 promoter.

[0475] Suitable promoters for use in prokaryotic host cells include, but are not limited to, a bacteriophage T7 RNA polymerase promoter; a trp promoter; a lac operon promoter; a hybrid promoter, e.g., a lac/lac hybrid promoter, a tac/trc hybrid promoter, a trp/lac promoter, a T7/lac promoter; a trc promoter; a tac promoter; an araBAD promoter; in vivo regulated promoters, such as an ssaG promoter or a related promoter (for example, as described in U.S. Patent Publication No. 20040131637), a pagC promoter (for example, as described in Pulkkinen and Miller, J. Bacteriol., 1991: 173(1): 86-93; and Alpuche-Aranda et al., PNAS, 1992; 89(21): 10079-83), a nirB promoter (for example, as described in Harborne et al. (1992) Mol. Micro, 6:2805-2813; Dunstan et al. (1999) Infect. Immun. 67:5133-5141; McKelvie et al. (2004) Vaccine 22:3243-3255; and Chatfield et al. (1992) Biotechnol. 10:888-892); a sigma70 promoter, e.g., a consensus sigma70 promoter (for example, GenBank Accession Nos. AX798980, AX798961, and AX798183); a stationary phase promoter, e.g., a dps promoter, an spy promoter; a promoter derived from the pathogenicity island SPI-2 (for example, as described in WO96/17951); an actA promoter (for example, as described in Shetron-Rama et al. (2002) Infect. Immun. 70:1087-1096); an rpsM promoter (for example, as described in Valdivia and Falkow (1996). Mol. Microbiol. 22:367-378); a tet promoter (for example, as described in Hillen, W. and Wissmann, A. (1989) In Saenger, W. and Heinemann, U. (eds), Topics in Molecular and Structural Biology, Protein-Nucleic Acid Interaction. Macmillan, London, UK, Vol. 10, pp. 143-162); and an SP6 promoter (for example, as described in Melton et al. (1984) Nucl. Acids Res. 12:7035-7056).

[0476] In yeast, a number of vectors containing constitutive or inducible promoters may be used. For a review of such vectors see, Current Protocols in Molecular Biology, Vol. 2, 1988, Ed. Ausubel, et al., Greene Publish. Assoc. & Wiley Interscience, Ch. 13; Grant, et al., 1987, Expression and Secretion Vectors for Yeast, in Methods in Enzymology, Eds. Wu & Grossman, 31987, Acad. Press, N.Y., Vol. 153, pp. 516-544; Glover, 1986, DNA Cloning, Vol. II, IRL Press, Wash., D.C., Ch. 3; Bitter, 1987, Heterologous Gene Expression in Yeast, Methods in Enzymology, Eds. Berger & Kimmel, Acad. Press, N.Y., Vol. 152, pp. 673-684; and The Molecular Biology of the Yeast Saccharomyces, 1982, Eds. Strathern et al., Cold Spring Harbor Press, Vols. I and II. A constitutive yeast promoter such as ADH or LEU2 or an inducible promoter such as GAL may be used (for example, as described in Cloning in Yeast, Ch. 3, R. Rothstein In: DNA Cloning Vol. 11, A Practical Approach, Ed. DM Glover, 1986, IRL Press, Wash., D.C.). Alternatively, vectors may be used which promote integration of foreign DNA sequences into the yeast chromosome.

[0477] Non-limiting examples of suitable eukaryotic promoters include CMV immediate early, HSV thymidine kinase, early and late SV40, LTRs from retrovirus, and mouse metallothionein-1. Selection of the appropriate vector and promoter is well within the level of ordinary skill in the art. The expression vector may also contain a ribosome binding site for translation initiation and a transcription terminator. The expression vector may also include appropriate sequences for amplifying expression.

[0478] A vector utilized in the practice of the disclosure also can contain one or more additional nucleotide sequences that confer desirable characteristics on the vector, including, for example, sequences such as cloning sites that facilitate manipulation of the vector, regulatory elements that direct replication of the vector or transcription of nucleotide sequences contain therein, and sequences that encode a selectable marker. As such, the vector can contain, for example, one or more cloning sites such as a multiple cloning site, which can, but need not, be positioned such that a exogenous or endogenous polynucleotide can be inserted into the vector and operatively linked to a desired element.

[0479] The vector also can contain a prokaryote origin of replication (ori), for example, an E. coli ori or a cosmid ori, thus allowing passage of the vector into a prokaryote host cell, as well as into a plant chloroplast. Various bacterial and viral origins of replication are well known to those skilled in the art and include, but are not limited to the pBR322 plasmid origin, the 2u plasmid origin, and the SV40, polyoma, adenovirus, VSV, and BPV viral origins.

[0480] A regulatory or control element, as the term is used herein, broadly refers to a nucleotide sequence that regulates the transcription or translation of a polynucleotide or the localization of a polypeptide to which it is operatively linked. Examples include, but are not limited to, an RBS, a promoter, enhancer, transcription terminator, an initiation (start) codon, a splicing signal for intron excision and maintenance of a correct reading frame, a STOP codon, an amber or ochre codon, an IRES. Additionally, an element can be a cell compartmentalization signal (i.e., a sequence that targets a polypeptide to the cytosol, nucleus, chloroplast membrane or cell membrane). In some aspects of the present disclosure, a cell compartmentalization signal (e.g., a cell membrane targeting sequence) may be ligated to a gene and/or transcript, such that translation of the gene occurs in the chloroplast. In other aspects, a cell compartmentalization signal may be ligated to a gene such that, following translation of the gene, the protein is transported to the cell membrane. Cell compartmentalization signals are well known in the art and have been widely reported (see, e.g., U.S. Pat. No. 5,776,689).

[0481] A vector, or a linearized portion thereof, may include a nucleotide sequence encoding a reporter polypeptide or other selectable marker. The term “reporter” or “selectable marker” refers to a polynucleotide (or encoded polypeptide) that confers a detectable phenotype. A reporter generally encodes a detectable polypeptide, for example, a green fluorescent protein or an enzyme such as luciferase, which, when contacted with an appropriate agent (a particular wavelength of light or luciferin, respectively) generates a signal that can be detected by eye or using appropriate instrumentation (for example, as described in Giacomin, Plant Sci. 116:59-72, 1996; Scikantha, J. Bacteriol. 178:121, 1996; Gerdes, FEBS Lett. 389:44-47, 1996; and Jefferson. EMBO J. 6:3901-3907, 1997, fl-glucuronidase). A selectable marker generally is a molecule that, when present or expressed in a cell, provides a selective advantage (or disadvantage) to the cell containing the marker, for example, the ability to grow in the presence of an agent that otherwise would kill the cell.

[0482] A selectable marker can provide a means to obtain, for example, prokaryotic cells, eukaryotic cells, and/or plant cells that express the marker and, therefore, can be useful as a component of a vector of the disclosure. The selection gene or marker can encode for a protein necessary for the survival or growth of the host cell transformed with the vector. One class of selectable markers are native or modified genes which restore a biological or physiological function to a host cell (e.g., restores photosynthetic capability or restores a metabolic pathway). Other examples of selectable markers include, but are not limited to, those that confer antimetabolite resistance, for example, dihydrofolate reductase, which confers resistance to methotrexate (for example, as described in Reiss, Plant Physiol. (Life Sci. Adv.) 13:143-149, 1994); neomycin phosphotransferase, which confers resistance to the aminoglycosides neomycin, kanamycin and paromycin (for example, as described in Herrera-Estrella, EMBO J. 2:987-995, 1983), hygro, which confers resistance to hygromycin (for example, as described in Marsh, Gene 32:481-485, 1984), trpB, which allows cells to utilize indole in place of tryptophan; hisD, which allows cells to utilize histinol in place of histidine (for example, as described in Hartman, Proc. Natl. Acad. Sci., USA 85:8047, 1988); mannose-6-phosphate isomerase which allows cells to utilize mannose (for example, as described in PCT Publication Application No. WO 94/20627); ornithine decarboxylase, which confers resistance to the ornithine decarboxylase inhibitor, 2-(difluoromethyl)-DL-ornithine (DFMO; for example, as described in McConlogue, 1987, In: Current Communications in Molecular Biology, Cold Spring Harbor Laboratory ed.); and deaminase from Aspergillus terreus, which confers resistance to Blasticidin S (for example, as described in Tamura, Biosci. Biotechnol. Biochem. 59:2336-2338, 1995). Additional selectable markers include those that confer herbicide resistance, for example, phosphinothricin acetyltransferase gene, which confers resistance to phosphinothricin (for example, as described in White et al., Nucl. Acids Res. 18:1062, 1990; and Spencer et al., Theor. Appl. Genet. 79:625-631, 1990), a mutant EPSPV-synthase, which confers glyphosate resistance (for example, as described in Hinchee et al., BioTechnology 91:915-922, 1998), a mutant acetolactate synthase, which confers imidazolione or sulfonylurea resistance (for example, as described in Lee et al., EMBO J. 7:1241-1248, 1988), a mutant psbA, which confers resistance to atrazine (for example, as described in Smeda et al., Plant Physiol. 103:911-917, 1993), or a mutant protoporphyrinogen oxidase (for example, as described in U.S. Pat. No. 5,767,373), or other markers conferring resistance to an herbicide such as glufosinate. Selectable markers include polynucleotides that confer dihydrofolate reductase (DHFR) or neomycin resistance for eukaryotic cells; tetramycin or ampicillin resistance for prokaryotes such as E. coli; and bleomycin, gentamycin, glyphosate, hygromycin, kanamycin, methotrexate, phleomycin, phosphinotricin, spectinomycin, dtreptomycin, streptomycin, sulfonamide and sulfonylurea resistance in plants (for example, as described in Maliga et al., Methods in Plant Molecular Biology, Cold Spring Harbor Laboratory Press, 1995, page 39). The selection marker can have its own promoter or its expression can be driven by a promoter driving the expression of a polypeptide of interest.

[0483] Reporter genes greatly enhance the ability to monitor gene expression in a number of biological organisms. Reporter genes have been successfully used in chloroplasts of higher plants, and high levels of recombinant protein expression have been reported. In addition, reporter genes have been used in the chloroplast of C. reinhardtii. In chloroplasts of higher plants, β-glucuronidase (uidA, for example, as described in Staub and Maliga, EMBO J. 12:601-606, 1993), neomycin phosphotransferase (nptII, for example, as described in Carrer et al., Mol. Gen. Genet. 241:49-56, 1993), adenosyl-3-adenyltransf-erase (aadA, for example, as described in Svab and Maliga, Proc. Natl. Acad. Sci., USA 90:913-917, 1993), and the Aequorea victoria GFP (for example, as described in Sidorov et al., Plant J. 19:209-216, 1999) have been used as reporter genes (for example, as described in Heifetz, Biochemie 82:655-666, 2000). Each of these genes has attributes that make them useful reporters of chloroplast gene expression, such as ease of analysis, sensitivity, or the ability to examine expression in situ. Based upon these studies, other exogenous proteins have been expressed in the chloroplasts of higher plants such as Bacillus thuringiensis Cry toxins, conferring resistance to insect herbivores (for example, as described in Kota et al., Proc. Natl. Acad. Sci., USA 96:1840-1845, 1999), or human somatotropin (for example, as described in Staub et al., Nat. Biotechnol. 18:333-338, 2000), a potential biopharmaceutical. Several reporter genes have been expressed in the chloroplast of the eukaryotic green alga, C. reinhardtii, including aadA (for example, as described in Goldschmidt-Clermont. Nucl. Acids Res. 19:4083-4089 1991; and Zerges and Rochaix, Mol. Cell Biol. 14:5268-5277, 1994), uidA (for example, as described in Sakamoto et al., Proc. Natl. Acad. Sci., USA 90:477-501, 1993; and Ishikura et al., J. Biosci. Bioeng. 87:307-314 1999), Renilla luciferase (for example, as described in Minko et al., Mol. Gen. Genet. 262:421-425, 1999) and the amino glycoside phosphotransferase from Acinetobacter baumanii, aphA6 (for example, as described in Bateman and Purton, Mol. Gen. Genet 263:404-410, 2000). In one embodiment the protein described herein is modified by the addition of an N-terminal strep tag epitope to add in the detection of protein expression.

[0484] In some instances, the vectors of the present disclosure will contain elements such as an E. coli or S. cerevisiae origin of replication. Such features, combined with appropriate selectable markers, allows for the vector to be “shuttled” between the target host cell and a bacterial and/or yeast cell. The ability to passage a shuttle vector of the disclosure in a secondary host may allow for more convenient manipulation of the features of the vector. For example, a reaction mixture containing the vector and inserted polynucleotide(s) of interest can be transformed into prokaryote host cells such as E. coli, amplified and collected using routine methods, and examined to identify vectors containing an insert or construct of interest. If desired, the vector can be further manipulated, for example, by performing site directed mutagenesis of the inserted polynucleotide, then again amplifying and selecting vectors having a mutated polynucleotide of interest. A shuttle vector then can be introduced into plant cell chloroplasts, wherein a polypeptide of interest can be expressed and, if desired, isolated according to a method of the disclosure.

[0485] Knowledge of the chloroplast or nuclear genome of the host organism, for example, C. reinhardtii, is useful in the construction of vectors for use in the disclosed embodiments. Chloroplast vectors and methods for selecting regions of a chloroplast genome for use as a vector are well known (see, for example, Bock, J. Mol. Biol. 312:425-438, 2001; Staub and Maliga, Plant Cell 4:39-45, 1992; and Kavanagh et al., Genetics 152:1111-1122, 1999, each of which is incorporated herein by reference). The entire chloroplast genome of C. reinhardtii is available to the public on the world wide web, at the URL “biology.duke.edu/chlamy_genome/-chloro.html” (see “view complete genome as text file” link and “maps of the chloroplast genome” link; J. Maul, J. W. Lilly, and D. B. Stern, unpublished results; revised Jan. 28, 2002; to be published as GenBank Ace. No. AF396929; and Maul, J. E., et al. (2002) The Plant Cell, Vol. 14 (2659-2679)). Generally, the nucleotide sequence of the chloroplast genomic DNA that is selected for use is not a portion of a gene, including a regulatory sequence or coding sequence. For example, the selected sequence is not a gene that if disrupted, due to the homologous recombination event, would produce a deleterious effect with respect to the chloroplast. For example, a deleterious effect on the replication of the chloroplast genome or to a plant cell containing the chloroplast. In this respect, the website containing the C. reinhardtii chloroplast genome sequence also provides maps showing coding and non-coding regions of the chloroplast genome, thus facilitating selection of a sequence useful for constructing a vector (also described in Maul, J. E., et al. (2002) The Plant Cell, Vol. 14 (2659-2679)). For example, the chloroplast vector, p322, is a clone extending from the Eco (Eco RI) site at about position 143.1 kb to the Xho (Xho I) site at about position 148.5 kb (see, world wide web, at the URL “biology.duke.edu/chlamy_genome/chloro.html”, and clicking on “maps of the chloroplast genome” link, and “140-150 kb” link; also accessible directly on world wide web at URL “biology.duke.edu/chlam-y/chloro/chlorol40.html”).

[0486] In addition, the entire nuclear genome of C. reinhardtii is described in Merchant, S. S., et al., Science (2007), 318(5848):245-250, thus facilitating one of skill in the art to select a sequence or sequences useful for constructing a vector.

[0487] For expression of the polypeptide in a host, an expression cassette or vector may be employed. The expression vector will provide a transcriptional and translational initiation region, which may be inducible or constitutive, where the coding region is operably linked under the transcriptional control of the transcriptional initiation region, and a transcriptional and translational termination region. These control regions may be native to the gene, or may be derived from an exogenous source. Expression vectors generally have convenient restriction sites located near the promoter sequence to provide for the insertion of nucleic acid sequences encoding exogenous or endogenous proteins. A selectable marker operative in the expression host may be present.

[0488] The nucleotide sequences may be inserted into a vector by a variety of methods. In the most common method the sequences are inserted into an appropriate restriction endonuclease site(s) using procedures commonly known to those skilled in the art and detailed in, for example, Sambrook et al., Molecular Cloning, A Laboratory Manual, 2^{nd} Ed., Cold Spring Harbor Press, (1989) and Ausubel et al., Short Protocols in Molecular Biology, 2^{nd} Ed., John Wiley & Sons (1992).

[0489] The description herein provides that host cells may be transformed with vectors. One of skill in the art will recognize that such transformation includes transformation with circular or linearized vectors, or linearized portions of a vector. Thus, a host cell comprising a vector may contain the entire vector in the cell (in either circular or linear form), or may contain a linearized portion of a vector of the present disclosure. In some instances 0.5 to 1.5 kb flanking nucleotide sequences of chloroplast genomic DNA may be used. In some instances 0.5 to 1.5 kb flanking nucleotide sequences of nuclear genomic DNA may be used, or 2.0 to 5.0 kb may be used.

[0490] Compounds

[0491] The modified or transformed host organism disclosed herein is useful in the production of a desired biomolecule, compound, composition, or product; these terms can be used interchangeably. The present disclosure provides methods of producing, for example, an isoprenoid or isoprenoid precursor compound in a host cell. One such method involves, culturing a modified host cell in a suitable culture medium under conditions that promote synthesis of a product, for example, an isoprenoid compound or isoprenoid precursor compound, where the isoprenoid compound is generated by the expression of an enzyme of the present disclosure, wherein the enzyme uses a substrate present in the host cell. In some embodiments, a method further comprises isolating the isoprenoid compound from the cell and/or from the culture medium.

[0492] In some embodiments, the product (e.g. fuel molecule) is collected by harvesting the liquid medium. As some fuel molecules (e.g., monoterpenes) are immiscible in water, they would float to the surface of the liquid medium and could be extracted easily, for example by skimming. In other instances, the fuel molecules can be extracted from the liquid medium. In still other instances, the fuel molecules are volatile. In such instances, impermeable barriers can cover or otherwise surround the growth environment and can be extracted from the air within the barrier. For some fuel molecules, the product may be extracted from both the environment (e.g., liquid environment and/or air) and from the intact host cells. Typically, the organism would be harvested at an appropriate point and the product may then be extracted from the organism. The collection of cells may be by any means known in the art, including, but not limited to concentrating cells, mechanical or chemical disruption of cells, and purification of product(s) from cell cultures and/or cell lysates. Cells and/or organisms can be grown and then the product(s) collected by any means known to one of skill in the art. One method of extracting the product is by harvesting the host cell or a group of host cells and then drying the cell(s). The product(s) from the dried host cell(s) are then harvested by crushing the cells to expose the product. In some instances, the product may be produced without killing the organisms. Producing and/or expressing the product may not render the organism unviable.

[0493] In some embodiments, a genetically modified host cell is cultured in a suitable medium (e.g., Luria-Bertoni broth, optionally supplemented with one or more additional agents, such as an inducer (e.g., where the isoprenoid synthase is under the control of an inducible promoter); and the culture medium is overlaid with an organic solvent, e.g. dodecane, forming an organic layer. The compound produced by the genetically modified host partitions into the organic layer, from which it can then be purified. In some embodiments, where, for example, a prenyl transferase, isoprenoid synthase or mevalonate synthesis-encoding nucleotide sequence is operably linked to an inducible promoter, an inducer is added to the culture medium; and, after a suitable time, the compound is isolated from the organic layer overlaid on the culture medium.

[0494] In some embodiments, the compound or product, for example, an isoprenoid compound will be separated from other products which may be present in the organic layer. Separation of the compound from other products that may be present in the organic layer is readily achieved using, e.g., standard chromatographic techniques.

[0495] Methods of culturing the host cells, separating products, and isolating the desired product or products are known to one of skill in the art and are discussed further herein.

[0496] In some embodiments, the compound, for example, an isoprenoid or isoprenoid compound is produced in a genetically modified host cell at a level that is at least about 2-fold, at least about 5-fold, at least about 10-fold, at least about 25-fold, at least about 50-fold, at least about 100-fold, at least about 500-fold, at least about 1000-fold, at least about 2000-fold, at least about 3000-fold, at least about 4000-fold, at least about 5000-fold, or at least about 10,000-fold, or more, higher than the level of the isoprenoid or isoprenoid precursor compound produced in an unmodified host cell that produces the isoprenoid or isoprenoid precursor compound via the same biosynthetic pathway.

[0497] In some embodiments, the compound, for example, an isoprenoid compound is pure, e.g., at least about 40% pure, at least about 50% pure, at least about 60% pure, at least about 70% pure, at least about 80% pure, at least about 90% pure, at least about 95% pure, at least about 98%, or more than 98% pure. “Pure” in the context of an isoprenoid compound refers to an isoprenoid compound that is free from other isoprenoid compounds, portions of compounds, contaminants, and unwanted byproducts, for example.

[0498] Examples of products contemplated herein include hydrocarbon products and hydrocarbon derivative products. A hydrocarbon product is one that consists of only hydrogen molecules and carbon molecules. A hydrocarbon derivative product is a hydrocarbon product with one or more heteroatoms, wherein the heteroatom is any atom that is not hydrogen or carbon. Examples of heteroatoms include, but are not limited to, nitrogen, oxygen, sulfur, and phosphorus. Some products can be hydrocarbon-rich, wherein, for example, at least 50%, at least 60%, at least 70%, at least 80%, at least 90%, or at least 95% of the product by weight is made up of carbon and hydrogen.

[0499] One exemplary group of hydrocarbon products are isoprenoids. Isoprenoids (including terpenoids) are derived from isoprene subunits, but are modified, for example, by the addition of heteroatoms such as oxygen, by carbon skeleton rearrangement, and by alkylation. Isoprenoids generally have a number of carbon atoms which is evenly divisible by five, but this is not a requirement as “irregular” terpenoids are known to one of skill in the art, Carotenoids, such as carotenes and xanthophylls, are examples of isoprenoids that are useful products. A steroid is an example of a terpenoid. Examples of isoprenoids include, but are not limited to, hemiterpenes (C5), monoterpenes (C10), sesquiterpenes (C15), diterpenes (C20), triterpenes (C30), tetraterpenes (C40), polyterpenes (Cₙ, wherein “n” is equal to or greater than 45), and their derivatives. Other examples of isoprenoids include, but are not limited to, limonene, 1,8-cineole, α-pinene, camphene, (+)-sabinene, myrcene, abietadiene, taxadiene, farnesyl pyrophosphate, fusicoccadiene, amorphadiene, (E)-α-bisabolene, zingiberene, or diapophytoene, and their derivatives.

[0500] Products, for example fuel products, comprising hydrocarbons, may be precursors or products conventionally derived from crude oil, or petroleum, such as, but not limited to, liquid petroleum gas, naptha (ligroin), gasoline, kerosene, diesel, lubricating oil, heavy gas, coke, asphalt, tar, and waxes.

[0501] Useful products include, but are not limited to, terpenes and terpenoids as described above. An exemplary group of terpenes are diterpenes (C20), Diterpenes are hydrocarbons that can be modified (e.g. oxidized, methyl groups removed, or cyclized); the carbon skeleton of a diterpene can be rearranged, to form, for example, terpenoids, such as fusicoccadiene. Fusicoccadiene may also be formed, for example, directly from the isoprene precursors, without being bound by the availability of diterpene or GGDP. Genetic modification of organisms, such as algae, by the methods described herein, can lead to the production of fusicoccadiene, for example, and other types of terpenes, such as limonene, for example. Genetic modification can also lead to the production of modified terpenes, such as methyl squalene or hydroxylated and/or conjugated terpenes such as paclitaxel.

[0502] Other useful products can be, for example, a product comprising a hydrocarbon obtained from an organism expressing a diterpene synthase. Such exemplary products include ent-kaurene, casbene, and fusicoccadiene, and may also include fuel additives.

[0503] In some embodiments, a product (such as a fuel product) contemplated herein comprises one or more carbons derived from an inorganic carbon source. In some embodiments, at least 10%, at least 20%, at least 30%, at least 40%, at least 50%, at least 60%, at least 70%, at least 80%, at least 90%, at least 95%, or at least 99% of the carbons of a product as described herein are derived from an inorganic carbon source. Examples of inorganic carbon sources include, but are not limited to, carbon dioxide, carbonate, bicarbonate, and carbonic acid. The product can be, for example, an organic molecule with carbons from an inorganic carbon source that were fixed during photosynthesis.

[0504] The products produced by the present disclosure may be naturally, or non-naturally (e.g., as a result of transformation) produced by the host cell(s) and/or organism(s) transformed. For example, products not naturally produced by algae may include non-native terpenes/terpenoids such as fusicoccadiene or limonene. A product naturally produced in algae may be a terpene such as a carotenoid (for example, beta-carotene). The host cell may be genetically modified, for example, by transformation of the cell with a sequence encoding a protein, wherein expression of the protein results in the secretion of a naturally or a non-naturally produced product or products. The product may be a molecule not found in nature.

[0505] Examples of products include petrochemical products, precursors of petrochemical products, fuel products, petroleum products, precursors of petroleum products, and all other substances that may be useful in the petrochemical industry. The product may be used for generating substances, or materials, useful in the petrochemical industry. The products may be used in a combustor such as a boiler, kiln, dryer or furnace. Other examples of combustors are internal combustion engines such as vehicle engines or generators, including gasoline engines, diesel engines, jet engines, and other types of engines. In one embodiment, a method herein comprises combusting a refined or “upgraded” composition. For example, combusting a refined composition can comprise inserting the refined composition into a combustion engine, such as an automobile engine or a jet engine. Products described herein may also be used to produce plastics, resins, fibers, elastomers, pharmaceuticals, neutraceuticals, lubricants, and gels, for example.

[0506] Useful products can also include isoprenoid precursors. Isoprenoid precursors are generated by one of two pathways; the mevalonate pathway or the methylerythritol phosphate (MEP) pathway. Both pathways generate dimethylallyl pyrophosphate (DMAPP) and isopentyl pyrophosphate (IPP), the common C5 precursor for isoprenoids. The DMAPP and TPP are condensed to form geranyl-diphosphate (GPP), or other precursors, such as farnesyl-diphosphate (FPP) or geranylgeranyl-diphosphate (GGPP), from which higher isoprenoids are formed.

[0507] Useful products can also include small alkanes (for example, 1 to approximately 4 carbons) such as methane, ethane, propane, or butane, which may be used for heating (such as in cooking) or making plastics. Products may also include molecules with a carbon backbone of approximately 5 to approximately 9 carbon atoms, such as naptha or ligroin, or their precursors. Other products may include molecules with a carbon background of about 5 to about 12 carbon atoms, or cycloalkanes used as gasoline or motor fuel. Molecules and aromatics of approximately 10 to approximately 18 carbons, such as kerosene, or its precursors, may also be useful as products. Other products include lubricating oil, heavy gas oil, or fuel oil, or their precursors, and can contain alkanes, cycloalkanes, or aromatics of approximately 12 to approximately 70 carbons. Products also include other residuals that can be derived from or found in crude oil, such as coke, asphalt, tar, and waxes, generally containing multiple rings with about 70 or more carbons, and their precursors.

[0508] Modified organisms can be grown, in some embodiments in the presence of CO₂, to produce a desired polypeptide. In some embodiments, the products produced by the modified organism are isolated or collected. Collected products, such as terpenes and terpenoids, may then be further modified, for example, by refining and/or cracking to produce fuel molecules or components.

[0509] The various products may be further refined to a final product for an end user by a number of processes. Refining can, for example, occur by fractional distillation. For example, a mixture of products, such as a mix of different hydrocarbons with various chain lengths may be separated into various components by fractional distillation.

[0510] Refining may also include any one or more of the following steps, cracking, unifying, or altering the product. Large products, such as large hydrocarbons (e.g. ≧C10), may be broken down into smaller fragments by cracking. Cracking may be performed by heat or high pressure, such as by steam, visbreaking, or coking. Products may also be refined by visbreaking, for example by thermally cracking large hydrocarbon molecules in the product by heating the product in a furnace. Refining may also include coking, wherein a heavy, almost pure carbon residue is produced. Cracking may also be performed by catalytic means to enhance the rate of the cracking reaction by using catalysts such as, but not limited to, zeolite, aluminum hydrosilicate, bauxite, or silica-alumina. Catalysis may be by fluid catalytic cracking, whereby a hot catalyst, such as zeolite, is used to catalyze cracking reactions. Catalysis may also be performed by hydrocracking, where lower temperatures are generally used in comparison to fluid catalytic cracking. Hydrocracking can occur in the presence of elevated partial pressure of hydrogen gas. Products may be refined by catalytic cracking to generate diesel, gasoline, and/or kerosene,

[0511] The products may also be refined by combining them in a unification step, for example by using catalysts, such as platinum or a platinum-rhenium mix. The unification process can produce hydrogen gas, a by-product, which may be used in cracking.

[0512] The products may also be refined by altering, rearranging, or restructuring hydrocarbons into smaller molecules. There are a number of chemical reactions that occur in catalytic reforming processes which are known to one of ordinary skill in the arts, Catalytic reforming can be performed in the presence of a catalyst and a high partial pressure of hydrogen. One common process is alkylation. For example, propylene and butylene are mixed with a catalyst such as hydrofluoric acid or sulfuric acid, and the resulting products are high octane hydrocarbons, which can be used to reduce knocking in gasoline blends.

[0513] The products may also be blended or combined into mixtures to obtain an end product. For example, the products may be blended to form gasoline of various grades, gasoline with or without additives, lubricating oils of various weights and grades, kerosene of various grades, jet fuel, diesel fuel, heating oil, and chemicals for making plastics and other polymers. Compositions of the products described herein may be combined or blended with fuel products produced by other means.

[0514] Some products produced from the host cells of the disclosure, especially after refining, will be identical to existing petrochemicals, i.e. contain the same chemical structure. For instance, crude oil contains the isoprenoid pristane, which is thought to be a breakdown product of phytol, which is a component of chlorophyll. Some of the products may not be the same as existing petrochemicals. However, although a molecule may not exist in conventional petrochemicals or refining, it may still be useful in these industries. For example, a hydrocarbon could be produced that is in the boiling point range of gasoline, and that could be used as gasoline or an additive, even though the hydrocarbon does not normally occur in gasoline.

[0515] A product herein can be described by its Carbon Isotope Distribution (CID). At the molecular level, a CID is the statistical likelihood of a single carbon atom within a molecule to be one of the naturally occurring carbon isotopes (for example, ¹²C, ¹³C, or ¹⁴C). At the bulk level of a product, a CID may be the relative abundance of naturally occurring carbon isotopes (for example, ¹²C, ¹³C, or ¹⁴C) in a compound containing at least one carbon atom. It is noted that the CID of a fossil fuel may differ based on its source. For example, with CID(fos), the CID of carbon in a fossil fuel, such as petroleum, natural gas, and coal is distinguishable from the CID(atm), the CID of carbon in current atmospheric carbon dioxide. Additionally, the CID(photo-atm) refers to the CID of a carbon-based compound made by photosynthesis in recent history where the source of inorganic carbon was carbon dioxide in the atmosphere. Also, CID(photo-fos) refers to the CID of a carbon based compound made by photosynthesis in recent history where the source of substantially all of the inorganic carbon was carbon dioxide produced by the burning of fossil fuels (for example, coal, natural gas, and/or petroleum). The exact distribution is also a characteristic of 1) the type of photosynthetic organism that produced the molecule, and 2) the source of inorganic carbon. These isotope distributions can be used to define the composition of photosynthetically-derived fuel products. Carbon isotopes are unevenly distributed among and within different compounds and the isotopic distribution can reveal information about the physical, chemical, and metabolic processes involved in carbon transformation. The overall abundance of ¹³C relative to ¹²C in a photosynthetic organism is often less than the overall abundance of ¹³C relative to ¹²C in atmospheric carbon dioxide, indicating that carbon isotope discrimation occurs in the incorporation of carbon dioxide into photosynthetic biomass.

[0516] A product, either before or after refining, can be identical to an existing petrochemical. Some of the fuel products may not be the same as existing petrochemicals. In one embodiment, a fuel product is similar to an existing petrochemical, except for the carbon isotope distribution. For example, it is believed that no fossil fuel petrochemicals have a δ¹³C distribution of less than −32%, whereas fuel products as described herein can have a δ¹³C distribution of less than −32%, less than −35%, less than −40%, less than −45%, less than −50%, less than −55%, or less than −60%. In another embodiment, a fuel product or composition is similar but not the same as an existing fossil fuel petrochemical and has a δ¹³C distribution of less than −32%, less than −35% less than −40%, less than −45%, less than −50%, less than −55% or less than −60%.

[0517] A fuel product can be a composition comprising, for example, hydrogen and carbon molecules, wherein the hydrogen and carbon molecules are at least about 80% of the atomic weight of the composition, and wherein the δ¹³C distribution of the composition is less than about −32%. For some fuel products described herein, the hydrogen and carbon molecules are at least 90% of the atomic weight of the composition. For example, a biodiesel or fatty acid methyl ester (which has less than 90% hydrogen and carbon molecules by weight) may not be part of the composition. In still other compositions, the hydrogen and carbon molecules are at least 95 or at least 99% of the atomic weight of the composition. In yet other compositions, the hydrogen and carbon molecules are 100% of the atomic weight of the composition. In some embodiments, the composition is a liquid. In other embodiments, the composition is a fuel additive or a fuel product.

[0518] Also described herein is a fuel product comprising a composition comprising: hydrogen and carbon molecules, wherein the hydrogen and carbon molecules are at least 80% of the atomic weight of the composition, and wherein the δ¹³C distribution of the composition is less than −32%; and a fuel component. In some embodiments, the δ¹³C distribution of the composition is less than about −35%, less than about −40%, less than about −45%, less than about −50%, less than about −55%, or less than about −60%. In some embodiments, the fuel component of the composition is a blending fuel, for example, a fossil fuel, gasoline, diesel, ethanol, jet fuel, or any combination thereof. In still other embodiments, the blending fuel has a δ¹³C distribution of greater than −32%. For some fuel products described herein, the fuel component is a fuel additive which may be MTBE, an anti-oxidant, an antistatic agent, a corrosion inhibitor, or any combination thereof. A fuel product as described herein may be a product generated by blending a fuel product as described and a fuel component. In some embodiments, the fuel product has a δ¹³C distribution of greater than −32%. In other embodiments, the fuel product has a δ¹³C distribution of less than −32%. For example, an oil composition extracted from an organism can be blended with a fuel component prior to refining (for example, cracking) in order to generate a fuel product as described herein. A fuel component, can be a fossil fuel, or a mixing blend for generating a fuel product. For example, a mixture for fuel blending may be a hydrocarbon mixture that is suitable for blending with another hydrocarbon mixture to generate a fuel product. For example, a mixture of light alkanes may not have a certain octane number to be suitable for a type of fuel, however, it can be blended with a high octane mixture to generate a fuel product. In another example, a composition with a δ¹³C distribution of less than −32% is blended with a hydrocarbon mixture for fuel blending to create a fuel product. In some embodiments, the composition or fuel component alone are not suitable as a fuel product, however, when combined, they are useful as a fuel product. In other embodiments, either the composition or the fuel component or both individually are suitable as a fuel product., in yet another embodiment, the fuel component is an existing petroleum product, such as gasoline or jet fuel. In other embodiments, the fuel component is derived from a renewable resource, such as bioethanol, biodiesel, and biogasoline.

[0519] Oil compositions, derived from biomass obtained from a host cell, can be used for producing high-octane hydrocarbon products. Thus, one embodiment describes a method of forming a fuel product, comprising: obtaining an upgraded oil composition, cracking the oil composition, and blending the resulting one or more light hydrocarbons, having 4 to 12 carbons and an Octane number of 80 or higher, with a hydrocarbon having an Octane number of 80 or less. The hydrocarbons having an Octane number of 80 or less are, for example, fossil fuels derived from refining crude oil.

[0520] The biomass feedstock obtained from a host organism can be modified or tagged such that the light hydrocarbon products can be identified or traced back to their original feedstock. For example, carbon isotopes can be introduced into a biomass hydrocarbon in the course of its biosynthesis. The tagged hydrocarbon feedstock can be subjected to the refining processes described herein to produce a light hydrocarbon product tagged with a carbon isotope. The isotopes allow for the identification of the tagged products, either alone or in combination with other untagged products, such that the tagged products can be traced back to their original biomass feedstocks.

TABLE A
Examples of Enzymes Involved in the Isoprenoid Pathway

| Synthase | Source | NCBI protein ID |
|---|---|---|
| Limonene | M. spicata | 2ONH_A |
| Cineole | S. officinalis | AAC26016 |
| Pinene | A. grandis | AAK83564 |
| Camphene | A. grandis | AAB70707 |
| Sabinene | S. officinalis | AAC26018 |
| Myrcene | A. grandis | AAB71084 |
| Abietadiene | A. grandis | Q38710 |
| Taxadiene | T. brevifolia | AAK83566 |
| FPP | G. gallus | P08836 |
| Amorphadiene | A. annua | AAF61439 |
| Bisabolene | A. grandis | O81086 |
| Diapophytoene | S. aureus | |
| Diapophytoene desaturase | S. aureus | |
| GPPS-LSU | M. spicata | AAF08793 |
| GPPS-SSU | M. spicata | AAF08792 |
| GPPS | A. thaliana | CAC16849 |
| GPPS | C. reinhardtii | EDP05515 |
| FPP | E. coli | NP_414955 |
| FPP | A. thaliana | NP_199588 |
| FPP | A. thaliana | NP_193452 |
| FPP | C. reinhardtii | EDP03194 |
| IPP isomerase | E. coli | NP_417365 |
| IPP isomerase | H. pluvialis | ABB80114 |
| Limonene | L. angustifolia | ABB73044 |
| Monoterpene | S. lycopersicum | AAX69064 |
| Terpinolene | O. basilicum | AAV63792 |
| Myrcene | O. basilicum | AAV63791 |
| Zingiberene | O. basilicum | AAV63788 |
| Myrcene | Q. ilex | CAC41012 |
| Myrcene | P. abies | AAS47696 |
| Myrcene, ocimene | A. thaliana | NP_179998 |
| Myrcene, ocimene | A. thaliana | NP_567511 |
| Sesquiterpene | Z. mays; B73 | AAS88571 |
| Sesquiterpene | A. thaliana | NP_199276 |
| Sesquiterpene | A. thaliana | NP_193064 |
| Sesquiterpene | A. thaliana | NP_193066 |
| Curcumene | P. cablin | AAS86319 |
| Farnesene | M. domestica | AAX19772 |
| Farnesene | C. sativus | AAU05951 |
| Farnesene | C. junos | AAK54279 |
| Farnesene | P. abies | AAS47697 |
| Bisabolene | P. abies | AAS47689 |
| Sesquiterpene | A. thaliana | NP_197784 |
| Sesquiterpene | A. thailana | NP_175313 |
| GPP Chimera | | |
| GPPS-LSU + SSU fusion | | |
| Geranylgeranyl reductase | A. thailana | NP_177587 |
| Geranylgeranyl reductase | C. reinhardtii | EDP09986 |
| Chlorophyllidohydrolase | C. reinhardtii | EDP01364 |
| Chlorophyllidohydrolase | A. thaliana | NP_564094 |
| Chlorophyllidohydrolase | A. thaliana | NP_199199 |
| Phosphatase | S. cerevisiae | AAB64930 |
| FPP A118W | G. gallus | |

[0521] Codon Optimization

[0522] As discussed above, one or more codons of an encoding polynucleotide can be “biased” or “optimized” to reflect the codon usage of the host organism. For example, one or more codons of an encoding polynucleotide can be “biased” or “optimized” to reflect chloroplast codon usage (Table B) or nuclear codon usage (Table C). Most amino acids are encoded by two or more different (degenerate) codons, and it is well recognized that various organisms utilize certain codons in preference to others. “Biased” or codon “optimized” can be used interchangeably throughout the specification. Codon bias can be variously skewed in different plants, including, for example, in alga as compared to tobacco. Generally, the codon bias selected reflects codon usage of the plant (or organelle therein) which is being transformed with the nucleic acids of the present disclosure.

[0523] A polynucleotide that is biased for a particular codon usage can be synthesized de novo, or can be genetically modified using routine recombinant DNA techniques, for example, by a site directed mutagenesis method, to change one or more codons such that they are biased for chloroplast codon usage.

[0524] Such preferential codon usage, which is utilized in chloroplasts, is referred to herein as “chloroplast codon usage.” Table B (below) shows the chloroplast codon usage for C. reinhardtii (see U.S. Patent Application Publication No.: 2004/0014174, published Jan. 22, 2004).

TABLE B
Chloroplast Codon Usage in Chlamydomonas reinhardtii

| | | | |
|---|---|---|---|
| UUU 34.1* (348**) | UCU 19.4 (198) | UAU 23.7 (242) | UGU 8.5 (87) |
| UUC 14.2 (145) | UCC 4.9 (50) | UAC 10.4 (106) | UGC 2.6 (27) |
| UUA 72.8 (742) | UCA 20.4 (208) | UAA 2.7 (28) | UGA 0.1 (1) |
| UUG 5.6 (57) | UCG 5.2 (53) | UAG 0.7 (7) | UGG 13.7 (140) |
| CUU 14.8 (151) | CCU 14.9 (152) | CAU 11.1 (113) | CGU 25.5 (260) |
| CUC 1.0 (10) | CCC 5.4 (55) | CAC 8.4 (86) | CGC 5.1 (52) |
| CUA 6.8 (69) | CCA 19.3 (197) | CAA 34.8 (355) | CGA 3.8 (39) |
| CUG 7.2 (73) | CCG 3.0 (31) | CAG 5.4 (55) | CGG 0.5 (5) |
| AUU 44.6 (455) | ACU 23.3 (237) | AAU 44.0 (449) | AGU 16.9 (172) |
| AUC 9.7 (99) | ACC 7.8 (80) | AAC 19.7 (201) | AGC 6.7 (68) |
| AUA 8.2 (84) | ACA 29.3 (299) | AAA 61.5 (627) | AGA 5.0 (51) |
| AUG 23.3 (238) | ACG 4.2 (43) | AAG 11.0 (112) | AGG 1.5 (15) |
| GUU 27.5 (280) | GCU 30.6 (312) | GAU 23.8 (243) | GGU 40.0 (408) |
| GUC 4.6 (47) | GCC 11.1 (113) | GAC 11.6 (118) | GGC 8.7 (89) |
| GUA 26.4 (269) | GCA 19.9 (203) | GAA 40.3 (411) | GGA 9.6 (98) |
| GUG 7.1 (72) | GCG 4.3 (44) | GAG 6.9 (70) | GGG 4.3 (44) |

*Frequency of codon usage per 1,000 codons.
**Number of times observed in 36 chloroplast coding sequences (10,193 codons).

[0525] The chloroplast codon bias can, but need not, be selected based on a particular organism in which a synthetic polynucleotide is to be expressed. The manipulation can be a change to a codon, for example, by a method such as site directed mutagenesis, by a method such as PCR using a primer that is mismatched for the nucleotide(s) to be changed such that the amplification product is biased to reflect chloroplast codon usage, or can be the de novo synthesis of polynucleotide sequence such that the change (bias) is introduced as a consequence of the synthesis procedure.

[0526] In addition to utilizing chloroplast codon bias as a means to provide efficient translation of a polypeptide, it will be recognized that an alternative means for obtaining efficient translation of a polypeptide in a chloroplast is to re-engineer the chloroplast genome (e.g., a C. reinhardtii chloroplast genome) for the expression of tRNAs not otherwise expressed in the chloroplast genome. Such an engineered algae expressing one or more exogenous tRNA molecules provides the advantage that it would obviate a requirement to modify every polynucleotide of interest that is to be introduced into and expressed from a chloroplast genome; instead, algae such as C. reinhardtii that comprise a genetically modified chloroplast genome can be provided and utilized for efficient translation of a polypeptide according to any method of the disclosure. Correlations between tRNA abundance and codon usage in highly expressed genes is well known (for example, as described in Franklin et al., Plant J. 30:733-744, 2002; Dong et al., J. Mol. Biol. 260:649-663, 1996; Duret, Trends Genet. 16:287-289, 2000; Goldman et. al., J. Mol. Biol. 245:467-473, 1995; and Komar et. al., Biol. Chem. 379:1295-1300, 1998). In E. coli, for example, re-engineering of strains to express underutilized tRNAs resulted in enhanced expression of genes which utilize these codons (see Novy et al., in Novations 12:1-3, 2001). Utilizing endogenous tRNA genes, site directed mutagenesis can be used to make a synthetic tRNA gene, which can be introduced into chloroplasts to complement rare or unused tRNA genes in a chloroplast genome, such as a C. reinhardtii chloroplast genome.

[0527] Generally, the chloroplast codon bias selected for purposes of the present disclosure, including, for example, in preparing a synthetic polynucleotide as disclosed herein reflects chloroplast codon usage of a plant chloroplast, and includes a codon bias that, with respect to the third position of a codon, is skewed towards A/T, for example, where the third position has greater than about 66% AT bias, or greater than about 70% AT bias. In one embodiment, the chloroplast codon usage is biased to reflect alga chloroplast codon usage, for example, C. reinhardtii, which has about 74.6% AT bias in the third codon position. Preferred codon usage in the chloroplasts of algae has been described in US 2004/0014174.

[0528] Table C exemplifies codons that are preferentially used in algal nuclear genes. The nuclear codon bias can, but need not, be selected based on a particular organism in which a synthetic polynucleotide is to be expressed. The manipulation can be a change to a codon, for example, by a method such as site directed mutagenesis, by a method such as PCR using a primer that is mismatched for the nucleotide(s) to be changed such that the amplification product is biased to reflect nuclear codon usage, or can be the de novo synthesis of polynucleotide sequence such that the change (bias) is introduced as a consequence of the synthesis procedure.

[0529] In addition to utilizing nuclear codon bias as a means to provide efficient translation of a polypeptide, it will be recognized that an alternative means for obtaining efficient translation of a polypeptide in a nucleus is to re-engineer the nuclear genome (e.g., a C. reinhardtii nuclear genome) for the expression of tRNAs not otherwise expressed in the nuclear genome. Such an engineered algae expressing one or more exogenous tRNA molecules provides the advantage that it would obviate a requirement to modify every polynucleotide of interest that is to be introduced into and expressed from a nuclear genome; instead, algae such as C. reinhardtii that comprise a genetically modified nuclear genome can be provided and utilized for efficient translation of a polypeptide according to any method of the disclosure. Correlations between tRNA abundance and codon usage in highly expressed genes is well known (for example, as described in Franklin et al., Plant J. 30:733-744, 2002; Dong et al., J. Mol. Biol. 260:649-663, 1996; Duret, Trends Genet. 16:287-289, 2000; Goldman et. Al., J. Mol. Biol. 245:467-473, 1995; and Komar et. Al., Biol. Chem. 379:1295-1300, 1998). In E. coli, for example, re-engineering of strains to express underutilized tRNAs resulted in enhanced expression of genes which utilize these codons (see Novy et al., in Novations 12:1-3, 2001). Utilizing endogenous tRNA genes, site directed mutagenesis can be used to make a synthetic tRNA gene, which can be introduced into the nucleus to complement rare or unused tRNA genes in a nuclear genome, such as a C. reinhardtii nuclear genome.

[0530] Generally, the nuclear codon bias selected for purposes of the present disclosure, including, for example, in preparing a synthetic polynucleotide as disclosed herein, can reflect nuclear codon usage of an algal nucleus and includes a codon bias that results in the coding sequence containing greater than 60% G/C content.

TABLE C
fields: [triplet] [frequency: per thousand] ([number])
Coding GC 66.30% 1^{st} letter GC 64.80% 2^{nd} letter GC 47.90%
3^{rd} letter GC 86.21%
Nuclear Codon Usage in Chlamydomonas reinhardtii

| | | | |
|---|---|---|---|
| UUU 5.0 (2110) | UCU 4.7 (1992) | UAU 2.6 (1085) | UGU 1.4 (601) |
| UUC 27.1 (11411) | UCC 16.1 (6782) | UAC 22.8 (9579) | UGC 13.1 (5498) |
| UUA 0.6 (247) | UCA 3.2 (1348) | UAA 1.0 (441) | UGA 0.5 (227) |
| UUG 4.0 (1673) | UCG 16.1 (6763) | UAG 0.4 (183) | UGG 13.2 (5559) |
| CUU 4.4 (1869) | CCU 8.1 (3416) | CAU 2.2 (919) | CGU 4.9 (2071) |
| CUC 13.0 (5480) | CCC 29.5 (12409) | CAC 17.2 (7252) | CGC 34.9 (14676) |
| CUA 2.6 (1086) | CCA 5.1 (2124) | CAA 4.2 (1780) | CGA 2.0 (841) |
| CUG 65.2 (27420) | CCG 20.7 (8684) | CAG 36.3 (15283) | CGG 11.2 (4711) |
| AUU 8.0 (3360) | ACU 5.2 (2171) | AAU 2.8 (1157) | AGU 2.6 (1089) |
| AUC 26.6 (11200) | ACC 27.7 (11663) | AAC 28.5 (11977) | AGC 22.8 (9590) |
| AUA 1.1 (443) | ACA 4.1 (1713) | AAA 2.4 (1028) | AGA 0.7 (287) |
| 0AUG 25.7 (10796) | ACG 15.9 (6684) | AAG 43.3 (18212) | AGG 2.7 (1150) |
| GUU 5.1 (2158) | GCU 16.7 (7030) | GAU 6.7 (2805) | GGU 9.5 (3984) |
| GUC 15.4 (6496) | GCC 54.6 (22960) | GAC 41.7 (17519) | GGC 62.0 (26064) |
| GUA 2.0 (857) | GCA 10.6 (4467) | GAA 2.8 (1172) | GGA 5.0 (2084) |
| GUG 46.5 (19558) | GCG 44.4 (18688) | GAG 53.5 (22486) | GGG 9.7 (4087) |

[0531] Table D lists the codon selected at each position for backtranslating the protein to a DNA sequence for synthesis. The selected codon is the sequence recognized by the tRNA encoded in the chloroplast genome when present; the stop codon (TAA) is the codon most frequently present in the chloroplast encoded genes. If an undesired restriction site is created, the next best choice according to the regular Chlamydomonas chloroplast usage table that eliminates the restriction site is selected.

TABLE D

| Amino acid | Codon utilized |
|---|---|
| F | TTC |
| L | TTA |
| I | ATC |
| V | GTA |
| S | TCA |
| P | CCA |
| T | ACA |
| A | GCA |
| Y | TAC |
| H | CAC |
| Q | CAA |
| N | AAC |
| K | AAA |
| D | GAC |
| E | GAA |
| C | TGC |
| R | CGT |
| G | GGC |
| W | TGG |
| M | ATG |
| STOP | TAA |

[0532] Percent Sequence Identity

[0533] One example of an algorithm that is suitable for determining percent sequence identity or sequence similarity between nucleic acid or polypeptide sequences is the BLAST algorithm, which is described, e.g., in Altschul et al., J. Mol. Biol. 215:403-410 (1990). Software for performing BLAST analysis is publicly available through the National Center for Biotechnology Information. The BLAST algorithm parameters W, T, and X determine the sensitivity and speed of the alignment. The BLASTN program (for nucleotide sequences) uses as defaults a word length (W) of 11, an expectation (E) of 10, a cutoff of 100, M=5, N=4, and a comparison of both strands. For amino acid sequences, the BLASTP program uses as defaults a word length (W) of 3, an expectation (E) of 10, and the BLOSUM62 scoring matrix (as described, for example, in Henikoff & Henikoff (1989) Proc. Natl. Acad. Sci. USA, 89:10915). In addition to calculating percent sequence identity, the BLAST algorithm also can perform a statistical analysis of the similarity between two sequences (for example, as described in Karlin & Altschul, Proc. Nat'l. Acad. Sci. USA, 90:5873-5787 (1993)). One measure of similarity provided by the BLAST algorithm is the smallest sum probability (P(N)), which provides an indication of the probability by which a match between two nucleotide or amino acid sequences would occur by chance. For example, a nucleic acid is considered similar to a reference sequence if the smallest sum probability in a comparison of the test nucleic acid to the reference nucleic acid is less than about 0.1, less than about 0.01, or less than about 0.001.

[0534] Fatty Acids and Glycerol Lipids

[0535] The present disclosure describes host cells capable of making polypeptides that contribute to the accumulation and/or secretion of fatty acids, glycerol lipids, or oils, by transforming host cells (e.g., alga cells such as C. reinhardtii, D. salina, H. pluvalis, and cyanobacterial cells) with nucleic acids encoding one or more different enzymes. Examples of such enzymes include acetyl-CoA carboxylase, ketoreductase, thioesterase, malonyltransferase, dehydratase, acyl-CoA ligase, ketoacylsynthase, enoylreductase, and desaturase. The enzymes can be, for example, catabolic or biodegrading enzymes.

[0536] In some instances, the host cell will naturally produce the fatty acid, glycerol lipid, triglyceride, or oil of interest. Therefore, transformation of the host cell with a polynucleotide encoding an enzyme, for example an ACCase, will allow for the increased activity of the enzyme and/or increased accumulation and/or secretion of a molecule of interest (e.g., a lipid) in the cell.

[0537] A change in the accumulation and/or secretion of a desired product, for example, fatty acids, glycerol lipids, or oils, by a transformed host cell can include, for example, a change in the total oil content over that normally present in the cell, or a change in the type of oil that is normally present in the cell.

[0538] Some host cells may be transformed with multiple genes encoding one or more enzymes. For example, a single transformed cell may contain exogenous nucleic acids encoding enzymes that make up an entire glycerolipid synthesis pathway. One example of a pathway might include genes encoding an acetyl CoA carboxylase, a malonyltransferase, a ketoacylsynthase, and a thioesterase. Cells transformed with an entire pathway and/or enzymes extracted from those cells, can synthesize, for example, complete fatty acids or intermediates of the fatty acid synthesis pathway. Constructs may contain, for example, multiple copies of the same gene, multiple genes encoding the same enzyme from different organisms, and/or multiple genes with one or more mutations in the coding sequence(s).

[0539] The enzyme(s) produced by the modified cells may result in the production of fatty acids, glycerol lipids, triglycerides, or oils that may be collected from the cells and, or the surrounding environment (e.g., bioreactor or growth medium). In some embodiments, the collection of the fatty acids, glycerol lipids, triglycerides, or oils is performed after the product is secreted from the cell via a cell membrane transporter.

[0540] Examples of candidate Chlamydomonas genes encoding enzymes of glycerolipid metabolism that can be used in the described embodiments are described in The Chlamydomonas Sourcebook Second Edition, Organellar and Metabolic Processes, Vol. 2, pp. 41-68, David B. Stern (Ed.), (2009), Elsevier Academic Press.

[0541] For example, enzymes involved in plastid, mitochondrial, and cytosolic pathways, along with plastidic and cytosolic isoforms of fatty acid desaturases, and triglyceride synthesis enzymes are described (and their accession numbers provided). An exemplary chart of some of the genes described is provided below:

| | | |
|---|---|---|
| Acyl-ACP thioesterase | FAT1 | EDP08596 |
| Long-chain acyl-CoA synthetase | LCS1 | EDO96800 |
| CDP-DAG: Inositol phosphotransferase | PIS1 | EDP06395 |
| Acyl-CoA: Diacylglycerol acyltransferase | DGA1 | EDO96893 |
| Phospholipid: Diacylglycerol | LRO1(LCA1) | EDP07444 |
| acyltransferase | | |

[0542] Examples of the types of fatty acids and/or glycerol lipids that a host cell or organism can produce, are described below.

[0543] Lipids are a broad group of naturally occurring molecules which includes fats, waxes, sterols, fat-soluble vitamins (such as vitamins A, D, E and K), monoglycerides, diglycerides, phospholipids, and others. The main biological functions of lipids include energy storage, as structural components of cell membranes, and as important signaling molecules.

[0544] Lipids may be broadly defined as hydrophobic or amphiphilic small molecules; the amphiphilic nature of some lipids allows them to form structures such as vesicles, liposomes, or membranes in an aqueous environment. Biological lipids originate entirely or in part from two distinct types of biochemical subunits or “building blocks”: ketoacyl and isoprene groups. Lipids may be divided into eight categories: fatty acyls, glycerolipids, glycerophospholipids, sphingolipids, saccharolipids and polyketides (derived from condensation of ketoacyl subunits); and sterol lipids and prenol lipids (derived from condensation of isoprene subunits). For this disclosure, saccharolipids will not be discussed.

[0545] Fats are a subgroup of lipids called triglycerides. Lipids also encompass molecules such as fatty acids and their derivatives (including tri-, di-, and monoglycerides and phospholipids), as well as other sterol-containing metabolites such as cholesterol. Humans and other mammals use various biosynthetic pathways to both break down and synthesize lipids.

[0546] Fatty Acyls

[0547] Fatty acyls, a generic term for describing fatty acids, their conjugates and derivatives, are a diverse group of molecules synthesized by chain-elongation of an acetyl-CoA primer with malonyl-CoA or methylmalonyl-CoA groups in a process called fatty acid synthesis. A fatty acid is any of the aliphatic monocarboxylic acids that can be liberated by hydrolysis from naturally occurring fats and oils. They are made of a hydrocarbon chain that terminates with a carboxylic acid group; this arrangement confers the molecule with a polar, hydrophilic end, and a nonpolar, hydrophobic end that is insoluble in water. The fatty acid structure is one of the most fundamental categories of biological lipids, and is commonly used as a building block of more structurally complex lipids. The carbon chain, typically between four to 24 carbons long, may be saturated or unsaturated, and may be attached to functional groups containing oxygen, halogens, nitrogen and sulfur; branched fatty acids and hydroxyl fatty acids also occur, and very long chain acids of over 30 carbons are found in waxes. Where a double bond exists, there is the possibility of either a cis or trans geometric isomerism, which significantly affects the molecule's molecular configuration. Cis-double bonds cause the fatty acid chain to bend, an effect that is more pronounced the more double bonds there are in a chain. This in turn plays an important role in the structure and function of cell membranes. Most naturally occurring fatty acids are of the cis configuration, although the trans form does exist in some natural and partially hydrogenated fats and oils.

[0548] Examples of biologically important fatty acids are the eicosanoids, derived primarily from arachidonic acid and eicosapentaenoic acid, which include prostaglandins, leukotrienes, and thromboxanes. Other major lipid classes in the fatty acid category are the fatty esters and fatty amides. Fatty esters include important biochemical intermediates such as wax esters, fatty acid thioester coenzyme A derivatives, fatty acid thioester ACP derivatives and fatty acid carnitines. The fatty amides include N-acyl ethanolamines.

[0549] Glycerolipids

[0550] Glycerolipids are composed mainly of mono-, di- and tri-substituted glycerols, the most well-known being the fatty acid esters of glycerol (triacylglycerols), also known as triglycerides. In these compounds, the three hydroxyl groups of glycerol are each esterified, usually by different fatty acids. Because they function as a food store, these lipids comprise the bulk of storage fat in animal tissues. The hydrolysis of the ester bonds of triacylglycerols and the release of glycerol and fatty acids from adipose tissue is called fat mobilization.

[0551] Additional subclasses of glycerolipids are represented by glycosylglycerols, which are characterized by the presence of one or more sugar residues attached to glycerol via a glycosidic linkage. An example of a structure in this category is the digalactosyldiacylglycerols found in plant membranes.

[0552] Exemplary Chlamydomonas glycerolipids include: DGDG, digalactosyldiacylglycerol; DGTS, diacylglyceryl-N,N,N-trimethylhomoserine; MGDG, monogalactosyldiacylglycerol; PtdEtn, phosphatidylethanolamine; PtdGro, phosphatidylglycerol; PtdIns, phosphatidylinositol; SQDG, sulfoquinovosyldiacylglycerol; and TAG, triacylglycerol.

[0553] Glycerophospholipids

[0554] Glycerophospholipids are any derivative of glycerophosphoric acid that contains at least one O-acyl, O-alkyl, or O-alkenyl group attached to the glycerol residue. The common glycerophospholipids are named as derivatives of phosphatidic acid (phosphatidyl choline, phosphatidyl serine, and phosphatidyl ethanolamine).

[0555] Glycerophospholipids, also referred to as phospholipids, are ubiquitous in nature and are key components of the lipid bilayer of cells, as well as being involved in metabolism and cell signaling. Glycerophospholipids may be subdivided into distinct classes, based on the nature of the polar headgroup at the sn-3 position of the glycerol backbone in eukaryotes and eubacteria, or the sn-1 position in the case of archaebacteria.

[0556] Examples of glycerophospholipids found in biological membranes are phosphatidylcholine (also known as PC, GPCho or lecithin), phosphatidylethanolamine (PE or GPEtn) and phosphatidylserine (PS or GPSer). In addition to serving as a primary component of cellular membranes and binding sites for intra- and intercellular proteins, some glycerophospholipids in eukaryotic cells, such as phosphatidylinositols and phosphatidic acids are either precursors of, or are themselves, membrane-derived second messengers. Typically, one or both of these hydroxyl groups are acylated with long-chain fatty acids, but there are also alkyl-linked and 1Z-alkenyl-linked (plasmalogen) glycerophospholipids, as well as dialkylether variants in archaebacteria.

[0557] Sphingolipids

[0558] Sphingolipids are any of class of lipids containing the long-chain amino diol, sphingosine, or a closely related base (i.e. a sphingoid). A fatty acid is bound in an amide linkage to the amino group and the terminal hydroxyl may be linked to a number of residues such as a phosphate ester or a carbohydrate. The predominant base in animals is sphingosine while in plants it is phytosphingosine.

[0559] The main classes are: (1) phosphosphigolipids (also known as sphingophospholipids), of which the main representative is sphingomyelin; and (2) glycosphingolipids, which contain at least one monosaccharide and a sphingoid, and include the cerebrosides and gangliosides. Sphingolipids play an important structural role in cell membranes and may be involved in the regulation of protein kinase C.

[0560] As mentioned above, sphingolipids are a complex family of compounds that share a common structural feature, a sphingoid base backbone, and are synthesized de novo from the amino acid serine and a long-chain fatty acyl CoA, that are then converted into ceramides, phosphosphingolipids, glycosphingolipids and other compounds. The major sphingoid base of mammals is commonly referred to as sphingosine. Ceramides (N-acyl-sphingoid bases) are a major subclass of sphingoid base derivatives with an amide-linked fatty acid. The fatty acids are typically saturated or mono-unsaturated with chain lengths from 16 to 26 carbon atoms.

[0561] The major phosphosphingolipids of mammals are sphingomyelins (ceramide phosphocholines), whereas insects contain mainly ceramide phosphoethanolamines, and fungi have phytoceramide phosphoinositols and mannose-containing headgroups. The glycosphingolipids are a diverse family of molecules composed of one or more sugar residues linked via a glycosidic bond to the sphingoid base. Examples of these are the simple and complex glycosphingolipids such as cerebrosides and gangliosides.

[0562] Sterol Lipids

[0563] Sterol lipids, such as cholesterol and its derivatives, are an important component of membrane lipids, along with the glycerophospholipids and sphingomyelins. The steroids, all derived from the same fused four-ring core structure, have different biological roles as hormones and signaling molecules. The eighteen-carbon (C18) steroids include the estrogen family whereas the C19 steroids comprise the androgens such as testosterone and androsterone. The C21 subclass includes the progestogens as well as the glucocorticoids and mineralocorticoids. The secosteroids, comprising various forms of vitamin D, are characterized by cleavage of the B ring of the core structure. Other examples of sterols are the bile acids and their conjugates, which in mammals are oxidized derivatives of cholesterol and are synthesized in the liver. The plant equivalents are the phytosterols, such as β-sitosterol, stigmasterol, and brassicasterol; the latter compound is also used as a biomarker for algal growth. The predominant sterol in fungal cell membranes is ergosterol.

[0564] Prenol Lipids

[0565] Prenol lipids are synthesized from the 5-carbon precursors isopentenyl diphosphate and dimethylallyl diphosphate that are produced mainly via the mevalonic acid (MVA) pathway. The simple isoprenoids (for example, linear alcohols and diphosphates) are formed by the successive addition of C5 units, and are classified according to the number of these terpene units. Structures containing greater than 40 carbons are known as polyterpenes. Carotenoids are important simple isoprenoids that function as antioxidants and as precursors of vitamin A. Another biologically important class of molecules is exemplified by the quinones and hydroquinones, which contain an isoprenoid tail attached to a quinonoid core of non-isoprenoid origin. Prokaryotes synthesize polyprenols (called bactoprenols) in which the terminal isoprenoid unit attached to oxygen remains unsaturated, whereas in animal polyprenols (dolichols) the terminal isoprenoid is reduced.

[0566] Polyketides

[0567] Polyketides or sometimes acetogenin are any of a diverse group of natural products synthesized via linear poly-β-ketones, which are themselves formed by repetitive head-to-tail addition of acetyl (or substituted acetyl) units indirectly derived from acetate (or a substituted acetate) by a mechanism similar to that for fatty-acid biosynthesis but without the intermediate reductive steps. In many case, acetyl-CoA functions as the starter unit and malonyl-CoA as the extending unit. Various molecules other than acetyl-CoA may be used as starter, often with methoylmalonyl-CoA as the extending unit. The poly-β-ketones so formed may undergo a variety of further types of reactions, which include alkylation, cyclization, glycosylation, oxidation, and reduction. The classes of product formed—and their corresponding starter substances—comprise inter alia: coniine (of hemlock) and orsellinate (of lichens)—acetyl-CoA; flavanoids and stilbenes—cinnamoyl-CoA; tetracyclines—amide of malonyl-CoA; urushiols (of poison ivy)—palmitoleoyl-CoA; and erythonolides—propionyl-CoA and methyl-malonyl-CoA as extender.

[0568] Polyketides comprise a large number of secondary metabolites and natural products from animal, plant, bacterial, fungal and marine sources, and have great structural diversity. Many polyketides are cyclic molecules whose backbones are often further modified by glycosylation, methylation, hydroxylation, oxidation, and/or other processes. Many commonly used anti-microbial, anti-parasitic, and anti-cancer agents are polyketides or polyketide derivatives, such as erythromycins, tetracyclines, avermectins, and antitumor epothilones.

[0569] The following examples are intended to provide illustrations of the application of the present disclosure. The following examples are not intended to completely define or otherwise limit the scope of the disclosure. One of skill in the art will appreciate that many other methods known in the art may be substituted in lieu of the ones specifically described or referenced herein.

### EXAMPLES

### Example 1

### Generating the Library and Isolation of Candidate Strains

[0570] In this example, an insertional mutagenesis library was generated to isolate candidates resistant to high concentrations of Sodium Chloride. All DNA manipulations carried out in this example were essentially as described by Sambrook et al., Molecular Cloning: A Laboratory Manual (Cold Spring Harbor Laboratory Press 1989) and Cohen et al., Meth. Enzymol. 297, 192-208, 1998.

[0571] Transforming DNA, the SENuc146 plasmid shown in FIG. 8, was created by using pBluescript II SK(−) (Agilent Technologies, CA) as a vector backbone. The segment labeled Aph 7″ is the hygronmycin resistance gene from Streptomyces hygroscopicus. The first intron from the Chlamydomonas reinhardtii rbcS2 gene is cloned into Aph 7″ in order to increase expression levels and consequentially, the number of transformants (Berthold et al. Protist 153:401-412 (2002)). Aph 7″ is preceded by the Chlamydomonas reinhardtii β2-tubulin promoter and is followed by the Chlamydomonas reinhardtii rbcS2 terminator. Subsequently, the segment labeled “Hybrid Promoter” indicates a fused promoter region beginning with the C. reinhardtii Hsp70A promoter, C. reinhardtii rbcS2 promoter, and the first intron from the C. reinhardtii rbcS2 gene (Sizova et al. Gene, 277:221-229 (2001)). The SENuc140 plasmid (FIG. 9) was created by substituting Aph 7″ cassette with the gene encoding the aminoglycoside-O-phosphotransferase VIII (Aph VIII) from Streptomyces rimosus flanked by the promoter and terminator of the C. reinhardtii psaD gene. Expression of Aph VIII confers resistance to the antibiotic paromomycin and has been shown to yield large numbers of transformants (Sizova et al. Gene, 181:13-18 (1996)).

[0572] Transformation DNA was prepared by digesting either SENuc 146 or SENuc 140 with the restriction enzymes NotI and NdeI followed by DNA gel purification to separate the selectable marker cassette from the backbone vector. For these experiments, all transformations were carried out on C. reinhardtii cc1690 (mt+). Cells were grown and transformed via electroporation. Cells were grown to mid-log phase (approximately 2-6×10⁶ cells/ml) in TAP media. Cells were spun down at between 2000×g and 5000×g for 5 min. The supernatant was removed and the cells were resuspended in TAP media+40 mM sucrose. 250 ng (in 1-5 μL H₂O) of transformation DNA was mixed with 250 μL of 3×10⁸ cells/mL on ice and transferred to 0.4 cm electroporation cuvettes. In order to generate a sufficient number of transformants, at least 50 transformation reactions were set up. Electroporation was performed with the capacitance set at 25 uF, the voltage at 800 V to deliver 2000 V/cm resulting in a time constant of approximately 10-14 ms. Following electroporation, the cuvette was returned to room temperature for 5-20 min. For each transformation, cells were transferred to 10 ml of TAP media+40 mM sucrose and allowed to recover at room temperature for 12-16 hours with continuous shaking. Cells were then harvested by centrifugation at between 2000×g and 5000×g, the supernatant was discarded, and the pellet was resuspended in 0.5 ml TAP media+40 mM sucrose. The resuspended cells were then plated on solid TAP media+20 μg/mL hygromycin or solid TAP media+20 μg/mL paromomycin. 50 transformations, using a total of 12.5 μg of purified transformation DNA, would typically yield approximately 200,000 individual transformants.

[0573] Transformants were then scraped into 1 L liquid TAP media and allowed to recover at room temperature for 48 hours with continuous agitation. After one to two days of the library recovering in TAP media, a cell density count was taken. In order to ensure full coverage of the library, 10× of the library size was needed. For example, if the library size was 2×10⁵ transformants, then 2×10⁶ cells were carried on for selection.

[0574] As indicated above, 10× of the library size was spun down in triplicate at 3000×g for 5 minutes. The pellets were washed 3 times with 50 mL of G₀ media. After the washes, the pellets were resuspended in 10 mL of liquid G₀ media and plated on Bioassay Trays (Nunc catalog number 240835) containing solid G₀ media+75 mM NaCl, G₀+100 mM NaCl, and G₀+125 mM NaCl. G₀ media is composed of 0.07 mM FeCl₃, 11.71 mM Na₂EDTA, 0.0002 mM CoCl₂, 0.0003 mM ZnSO₄, 0.0001 mM CuSO₄, 0.0035 mM MnCl₂, 0.0001 mM Na₂MoO₄, 1.42 mM NaNO₃, 0.21 mM NaH₂PO₄, 0.003 mM Thiamine Hydrochloride, 0.0000019 mM Vitamin B₁₂, 0.0000106 mM Biotin, 0.406 mM MgSO_{4□}7H₂0, 0.0476 mM CaCl_{2□}2H₂0, 0.162 mM H₃BO₃, 0.00710 mM NaVO₃, 5.95 mM NaHCO₃. In addition, parallel liquid assays were performed using the same range of NaCl concentrations (data not shown). Plates were then placed at room temperature in high light in a box fed with 5% CO₂. Colonies tolerant to increased NaCl appeared about 10 to 14 days later. Colonies were struck out on solid G₀ media for single colonies to ensure clonality. Single colonies were then picked into liquid G₀ media for secondary screening.

[0575] Candidates were plated onto solid G₀ media+75 mM NaCl, G₀+100 mM NaCl, and G₀+125 mM NaCl. Candidates were also inoculated 1:100 (v:v) into liquid G₀ media+75 mM NaCl, G₀+100 mM NaCl, and G₀+125 mM NaCl. This process was utilized both to confirm the phenotype, but also to qualitatively rank order the candidates by level of resistance. Confirmed candidates were carried forward for identification and validation (Table 1).

### Example 2

### Segregation Analysis of Candidate Strains

[0576] Segregation analysis was another method to validate that the random insertion of the exogenous DNA containing a selectable marker conferring antibiotic resistance is genetically linked to the observed phenotype. The mating type + and mating type − of Chlamydomonas reinhardtii can be crossed. The S7 candidate strain (mating type +) was crossed with C. reinhardtii cc1691 (mating type −) by growing both separately on solid TAP media for 5-7 days at room temperature and high light. Cells were resuspended in nitrogen-free liquid TAP media for 2 hours under light. 200 μl of both S7 and cc1691 were mixed and left for at least 2 hours to mate. Cells were plated on solid HSM media and grown overnight under light and subsequently stored in the dark for 3 days. Chloroform vapor treatment was applied for 30 seconds to eliminate gametes. The plate was placed under light for approximately one week to allow the zygote to germinate. Clonal colonies were obtained by serial dilution.

[0577] 5 colonies that were resistant to hygromycin and 5 colonies that were sensitive to hygromycin were inoculated into liquid G₀ media and liquid G₀ media+75 mM NaCl. The results shown in FIG. 41 demonstrate that the phenotype segregates with the antibiotic resistance. This validates that the phenotype is physically linked with the gene disruption.

### Example 3

### Identification of Candidate Strains and miRNA Knockdown Analysis

[0578] In this example, the identity of the gene disruption of all candidate strains that were resistant to 75 mM-125 mM NaCl was determined. Subsequently, artificial miRNAs were designed to knockdown the identified gene to reproduce the phenotype as a means of validation. All DNA manipulations carried out in this example were essentially as described by Sambrook et al., Molecular Cloning: A Laboratory Manual (Cold Spring Harbor Laboratory Press 1989) and Cohen et al., Meth. Enzymol. 297, 192-208, 1998.

[0579] Identification

[0580] Candidate strains confirmed with the desired phenotype were grown on solid TAP media+20 μg/mL hygromycin or solid TAP media+20 μg/mL paromomycin depending on the transformation DNA used. Approximately 5 mL of a saturated culture was processed to isolate genomic DNA. Genomic DNA was isolated from individual mutants (colonies), using the Promega Wizard Genomic DNA Purification Kit (Promega Cat. #A1125). The procedure for “Isolation of Genomic DNA from Plant Tissue” outlined in the technical manual for the kit was followed. Results from identification are summarized in Table 1. Genome walking encompasses many methods, each resulting in limited success, that have been used to identify the DNA sequence flanking a region of known identity. Three main methods were utilized to maximize the success rate of identification. The methods are described.

[0581] Adaptor Ligation Method or Cassette PCR Adaptor

[0582] 500 ng-1 μg genomic DNA of a candidate strain was digested with blunt end restriction enzymes (PmII and PvuII) as recommended by the manufacturer (NEB). Digested genomic DNA was purified with Promega Wizard DNA Clean-up system (Promega Cat. #A7280). In order to generate the adaptor, both adaptor primers (see Table 3 for SEQ ID NO: 88 and SEQ ID NO: 89) were resuspended in STE buffer (10 mM Tris-HCl pH 8.0, 50 mM NaCl, 1 mM EDTA). 25 μL of each adapter pair was mixed into one reaction and annealed from 96° C. to 4° C. by decreasing 0.5° C. per second. 4 μl of digested and purified genomic DNA from each candidate was ligated to the 2 μl of 25 μM adaptor using T4 DNA ligase as recommended by the manufacturer (NEB). Primary PCR with adaptor ligated genomic DNA was performed under the following conditions: 1 μl ligated DNA, 1×Ex Taq Buffer (Takara Bio inc), 0.5M Betaine, 3% DMSO (dimethyl sulfoxide), 0.1 mM dNTPs, 1 μM Adaptor Primer 1 (SEQ ID NO: 92, see Table 3), 1 μM cassette-specific primer (SEQ ID NOS: 96, 97, 101, 102, 106, 107, 110, and 111, see Table 3 for an appropriate cassette-specific primer) and 1 unit Ex Taq (Takara Bio inc) in a 20 μl reaction volume. There were several options for the cassette-specific primer: hygromycin or paromomycin-specific, 5′ and/or 3′, and two or three primers within each specification. Primary PCR parameters were as follows: 1 cycle [95° C. for 2 min], 35 cycles [94° C. for 20 see, annealing at 55° C. for 20 sec, extension at 72° C. for 4 min], and 1 cycle [extension at 72° C. for 2 min].

[0583] A secondary nested PCR was then performed with 0.5 μl of the primary PCR reaction, 1 μM Adaptor Primer 2 (SEQ ID NO: 93, see Table 3), 1 μM nested cassette-specific primer (SEQ ID NOS: 98, 99, 100, 103, 104, 105, 108, 109, 112, 113, 114, see Table 3 for an appropriate nested-cassette specific primer), 1×Ex Taq Buffer (Takara Bio inc), 0.5M Betaine, 3% DMSO (dimethyl sulfoxide), 0.1 mM dNTPs, and 1 unit Ex Taq (Takara Bio inc) in a 20 μl reaction volume. There were several options for the nested cassette-specific primer: hygromycin or paromomycin-specific, 5′ and/or 3′, and two or three primers within each specification. Secondary PCR parameters were as follows: 1 cycle [94° C. for 2 min], 42 cycles [95° C. for 20 see, annealing at 57° C. for 20 see, extension at 72° C. for 4 min], and 1 cycle [extension at 72° C. for 2 min]. PCR reactions were observed on a 1% agarose/EtBr electrophoresis gel. Bands were excised and purified using Zymoclean Gel DNA Recovery Kit (Zymo research Cat. #D4022). Purified DNA was sequenced using the appropriate AP2 primer or the appropriate nested cassette-specific primer. BLAST analysis was used to identify the location of the insert in the Chlamydomonas reinhardtii nuclear genome (http://genome.jgi-psf.org/Chlre4/Chlre4.home.html). BLAST analysis was used to determine the identity of the disrupted gene.

[0584] Inverse Tandem Repeat (ITR) or Suppression PCR

[0585] 500 ng-1 μg genomic DNA of a candidate strain was digested with blunt end restriction enzymes (PmII and PvuII) as recommended by the manufacturer (NEB). Digested genomic DNA was purified with Promega Wizard DNA Clean-up system (Promega Cat. #A7280. In order to generate the adaptor, both adaptor primers (see Table 3 for SEQ ID NO: 90 and SEQ ID NO: 91) were resuspended in STE buffer (10 mM Tris-HC pH 8.0, 50 mM NaCl, 1 mM EDTA). 25 μL of each adapter pair was mixed into one reaction and annealed from 96° C. to 4° C. by decreasing 0.5° C. per second. 4 μl of digested and purified genomic DNA was ligated to 2 μl of 25 μM adaptor using T4 DNA ligase as recommended by the manufacturer (NEB).

[0586] Primary PCR with adaptor ligated genomic DNA was performed under the following conditions: 1 μl ligated DNA, 1×Ex Taq Buffer (Takara Bio inc), 0.5M Betaine, 3% DMSO (dimethyl sulfoxide), 0.1 mM dNTPs, 1 μM Adaptor Primer 3 (SEQ ID NO: 93, see Table 3), 1 μM cassette-specific primer (SEQ ID NOS: 96, 97, 101, 102, 106, 107, 110, and 111, see Table 3 for an appropriate cassette-specific primer) and 1 unit Ex Taq (Takara Bio inc) in a 20 μl reaction volume. There were several options for the cassette-specific primer: hygromycin or paromomycin-specific, 5′ and/or 3′, and two or three primers within each specification. Primary PCR parameters were as follows: 1 cycle [95° C. for 2 min], 35 cycles [94° C. for 20 see, annealing at 55° C. for 20 see, extension at 72° C. for 4 min], and 1 cycle [extension at 72° C. for 2 min].

[0587] A secondary nested PCR was then performed with 0.5 μl of the primary PCR reaction, 1 μM Adaptor Primer 4 (SEQ ID NO: 94, see Table 3), 1 μM cassette-specific primer (SEQ ID NOS: 98, 99, 100, 103, 104, 105, 108, 109, 112, 113, 114, see Table 3 for an appropriate nested cassette-specific primer), 1×Ex Taq Buffer (Takara Bio inc), 0.5M Betaine, 3% DMSO (dimethyl sulfoxide), 0.1 mM dNTPs, and 1 unit Ex Taq (Takara Bio inc) in a 20 μl reaction volume. There were several options for the nested cassette-specific primer: hygromycin or paromomycin-specific, 5′ and/or 3′, and two or three primers within each specification. Secondary PCR parameters were as follows: 1 cycle [95° C. for 2 min], 42 cycles [95° C. for 20 see, annealing at 57° C. for 20 sec, extension at 720° C. for 4 min], and 1 cycle [extension at 72° C. for 2 min]. PCR reactions were observed on a 1% agarose/EtBr electrophoresis gel. Bands were excised and purified using Zymoclean Gel DNA Recovery Kit (Zymo research Cat. #D4022). Purified DNA was sequenced using the appropriate AP4 primer or the nested cassette-specific primer. BLAST analysis was used to identify the location of the insert in the Chlamydomonas reinhardtii nuclear genome (http://genome.jgi-psf.org/Chlre4/Chlre4.home.html). BLAST analysis was used to determine the identity of the disrupted gene.

[0588] Restriction-Site PCR

[0589] Restriction site PCR takes advantage of endogenous restriction sites within the genome that helps serve as priming sites for PCR amplification (Sarkar, G., et al. (1993) Genome Res. 2: 318-322). Primary PCR with candidate strain genomic DNA was performed under the following conditions: 1 μl of 100 ng/μl DNA, 1×Ex Taq Buffer (Takara Bio inc), 0.5M Betaine, 3% DMSO (dimethyl sulfoxide), 0.1 mM dNTPs, 1 μM RSO primer (SEQ ID NO: 241 or SEQ ID NO: 242 in Table 3 can be used), 1 μM cassette-specific primer (SEQ ID NOS: 96, 97, 101, 102, 106, 107, 110, and 111, see Table 3 for an appropriate cassette-specific primer), and 1U Ex Taq (Takara Bio inc) in a 20 μl reaction volume. There were several options for the cassette-specific primer: hygromycin or paromomycin-specific, 5′ and/or 3′, and two or three primers within each specification. Primary PCR parameters were as follows: 1 cycle [94° C. for 2 min], 30 cycles [94° C. for 1 min, annealing at 55° C. for 1 min, extension at 72° C. for 3 min], and 1 cycle [extension at 72° C. for 10 min].

[0590] Secondary nested PCR was performed with 0.5 μl of the primary PCR reaction, 1×Ex Taq Buffer (Takara Bio, Inc.), 0.5M Betaine, 3% DMSO (dimethyl sulfoxide), 0.1 mM dNTPs, 1 μM of the same RSO primer used in the primary PCR, 1 μM nested cassette-specific primer (SEQ ID NOS: 98, 99, 100, 103, 104, 105, 108, 109, 112, 113, 114, see Table 3 for an appropriate nested cassette-specific primer), and 1U Ex Taq (Takara Bio inc) in a 20 μl reaction volume. There were several options for the cassette-specific primer: hygromycin or paromomycin-specific, 5′ and/or 3′, and two or three primers within each specification. Secondary nested PCR parameters were as follows: 1 cycle [94° C. for 2 min], 30 cycles [94° C. for 1 min, annealing at 55° C. for 1 min, extension at 72‘C’ for 3 min], and 1 cycle [extension at 72° C. for 10 min]. PCR reactions were observed on a 1% agarose/EtBr electrophoresis gel. Bands were excised and purified using Zymoclean Gel DNA Recovery Kit (Zymo research Cat, #D4022). Purified DNA was sequenced using the appropriate AP2 primer or the nested cassette-specific primer. BLAST analysis was used to identify the location of the insert in the Chlamydomonas reinhardtii nuclear genome (http://genome.jgi-psf.org/Chlre4/Chlre4.home.html). BLAST analysis was used to determine the identity of the disrupted gene.

[0591] Artificial miRNA Mediated Silencing

[0592] Sequence characterization of the gene disruption (See Table 1) allows for validation by RNA interference. Expression of a transcript may be suppressed by expressing inverted repeat transgenes or artificial miRNAs (Rohr, J., et al., Plant J, 40, 611-621 (2004); Molnar et al., Nature, 447:1126-1130 (2007); Molnar et al., Plant J, 58:165-174 (2009)). An example of the artificial miRNA system is shown in FIG. 5 and FIG. 6. A strain transformed with an expression cassette that produces two proteins, a Zeocin resistance protein and a xylanase (BD12), from a single transcript, was transformed with an artificial miRNA cassette to target the xylanase transcript. The variation of efficacy was shown by the 12 individual strains. Some strains were not knocked down (high in xyalanse activity, high in Zeocin resistance, high in xylanase transcript level), but some strains were knocked down (low in xlanase activity, sensitive to Zeocin, and low in xyalanse transcript). These data verified that applying artificial miRNA constituted a validation method. Reproducing the salt resistance by silencing the identified gene target validates the gene target as the genetic determinant of the phenotype.

[0593] The artificial miRNA expression vector was constructed as follows. The modified expression vector, SENuc391 (FIG. 1), was created by using pBluescript II SK(−) (Agilent Technologies, CA) as a vector backbone. The segment labeled “Aph 7″” was the hygromycin resistance gene from Streptomyces hygroscopicus. The first intron from the Chlamydomonas reinhardtii rbcS2 gene was cloned into Aph 7″ in order to increase expression levels and consequentially, the number of transformants (Berthold et al. Protist 153:401-412 (2002)). Aph 7″ was preceded by the Chlamydomonas reinhardtii β2-tubulin promoter and was followed by the Chlamydomonas reinhardtii rbcS2 terminator. The hygromycin resistance cassette was cloned into the NotI and XbaI sites of pBluescript II SK(−). Subsequently, the segment labeled “Hybrid Promoter” indicates a fused promoter region beginning with the C. reinhardtii Hsp70A promoter, C. reinhardtii rbcS2 promoter, and the first intron from the C. reinhardtii rbcS2 gene (Sizova et al. Gene, 277:221-229 (2001)). The “Hybrid Promoter” was PCR amplified using overlapping primers while introducing restriction sites to both the 5′ (XbaI) and 3′ (NdeI, BamHI, KpnI) ends. This PCR-generated fragment was cloned into the XbaI and KpnI sites of the hygromycin resistance cassette-containing pBluescript II SK(−). The segment labeled “Aph VIII” was the paromomycin resistance gene flanked by the promoter and terminator of the C. reinhardtii psaD gene. The cassette was blunt end ligated into the digested KpnI site treated with Klenow.

[0594] The generation of the precursor scaffold was performed similarly as previously described (Molnar et al., Plant J, 58:165-174 (2009)). The 5′ arm of the precursor scaffold was amplified from C. reinhardtii genomic DNA by two primers Arm Primer 1 (SEQ ID NO: 243) and Arm Primer 2 (SEQ ID NO: 244). The 3′ arm of the precursor scaffold was amplified by the two primers Arm Primer 3 (SEQ ID NO: 245) and Arm Primer 4 (SEQ ID NO: 246). The two resulting PCR fragments were gel purified and fused together in a PCR reaction using the primers Arm Primer 1 (SEQ ID NO: 243) and Arm Primer 4 (SEQ ID NO: 246) resulting in a 259 bp fusion product. The PCR fragment was gel-purified, digested with AseI and BamHI, and ligated into the NdeI and BamHI sites of SEnuc391.

[0595] The transcript IDs of the candidate genes (See Table 1) were submitted to the Web MicroRNA Designer (Ossowski et al., Plant J, 53:674-690; WMD3, http://wmd3.weigelworld.org/). For each gene, predicted miRNAs were converted to full stem-loop sequences, including the endogenous cre-MIR1157 spacer, and the corresponding miRNA*, using the WMD3 Oligo function with “pChlamiRNA2 and 3” selected as the vector. The resulting sequences were modified by adding flanking BglII sites, as well as adding sequence complementary to the 5′ end of the antisense strand of the BD11 (SEQ ID NO. 228) sequence to the 3′ end. The modified sequences were synthesized and Table 2 shows the artificial miRNA sequences that are associated with the NaCl candidate strain number and gene sequence. In order to clone the miRNA stem-loop sequences into SENuc391, a complementary strand was first added by PCR amplification in the presence of BD11, each ultramer, and a primer (SEQ ID NO. 229) in a 2-cycle Phusion PCR reaction following the manufacturer's instructions (Finnzymes). The resulting double-stranded DNA fragments were cloned into the BglII site of SENuc391. The resulting plasmid was sequenced for the appropriate orientation.

TABLE 2

| Sequence Listing | Strain | amiRNA Sequence |
|---|---|---|
| Number | Number | Number |
| SEQ ID NO: 115 | S7 | SEQ ID NO: 207 |
| SEQ ID NO: 116 | S16 | SEQ ID NO: 208 |
| SEQ ID NO: 122 | S65 | SEQ ID NO: 209 |
| SEQ ID NO: 201 | S1659 | SEQ ID NO: 223 |
| SEQ ID NO: 129 | S77 | SEQ ID NO: 210 |
| SEQ ID NO: 202 | S1666 | SEQ ID NO: 224 |
| SEQ ID NO: 206 | S1704 | SEQ ID NO: 227 |
| SEQ ID NO: 133 | S105 | SEQ ID NO: 211 |
| SEQ ID NO: 198 | S1612 | SEQ ID NO: 221 |
| SEQ ID NO: 200 | S1644 | SEQ ID NO: 222 |
| SEQ ID NO: 204 | S1693 | SEQ ID NO: 226 |
| SEQ ID NO: 203 | S1687 | SEQ ID NO: 225 |
| SEQ ID NO: 135 | S129 | SEQ ID NO: 213 |
| SEQ ID NO: 134 | S123 | SEQ ID NO: 212 |
| SEQ ID NO: 166 | S289 | SEQ ID NO: 215 |
| SEQ ID NO: 162 | S276 | SEQ ID NO: 214 |
| SEQ ID NO: 169 | S292 | SEQ ID NO: 217 |
| SEQ ID NO: 168 | S291 | SEQ ID NO: 216 |
| SEQ ID NO: 170 | S294 | SEQ ID NO: 218 |
| SEQ ID NO: 175 | S338 | SEQ ID NO: 220 |
| SEQ ID NO: 127 | S74 | SEQ ID NO: 235 |
| SEQ ID NO: 230 | S1613 | SEQ ID NO: 236 |
| SEQ ID NO: 231 | S1621 | SEQ ID NO: 237 |
| SEQ ID NO: 232 | S1623 | SEQ ID NO: 238 |
| SEQ ID NO: 233 | S1638 | SEQ ID NO: 239 |
| SEQ ID NO: 234 | S1655 | SEQ ID NO: 240 |

[0596] Preparation of the transformation DNA involves a restriction digest with the enzymes PsiI to linearize the DNA. All transformations were carried out on C. reinhardtii cc1690 (mt+). Cells were grown and transformed via electroporation. Cells were grown to mid-log phase (approximately 2-6×10⁶ cells/ml) in TAP media. Cells were spun down gently (between 2000 and 5000×g) for 5 min. The supernatant was removed and the cells were resuspended in TAP media+40 mM sucrose. 1 μg (in 1-5 μL H₂O) of transformation DNA was mixed with 250 μL of 3×10⁸ cells/mL on ice and transferred to 0.4 cm electroporation cuvettes. Electroporation was performed with the capacitance set at 25 uF, the voltage at 800 V to deliver 2000 V/cm resulting in a time constant of approximately 10-14 ms. Following electroporation, the cuvette was returned to room temperature for 5-20 min. Cells were transferred to 10 ml of TAP media+40 mM sucrose and allowed to recover at room temperature for 12-16 hours with continuous shaking. Cells were then harvested by centrifugation for 5 min at between 2000×g and 5000×g, the supernatant was discarded, and the pellet was resuspended in 0.5 ml TAP media+40 mM sucrose. The resuspended cells were then plated on solid TAP media+10 μg/mL hygromycin and +10 μg/mL paromomycin.

[0597] Selection

[0598] 42 Colonies transformed with artificial miRNA constructs were picked into a 96-well microtiter plate and grown in 200 μl G₀ media at room temperature in high light in a box fed with 5% CO₂. Also included was a positive control that was highly resistant to NaCl, the original gene disruption strain as a control, and wildtype C. reinhardtii cc1690 (mt+) negative control. Once cultures were grown to saturation, 2 μl of culture was pipetted onto solid G₀ media+75 mM NaCl, G₀ media+100 mM NaCl, G₀ media+125 mM NaCl (FIG. 15-38). In FIGS. 15-32, the wildtype negative control is in position row 8 column 6, original gene disruption strain in position row 8 column 5, and the NaCl resistant positive control in position row 8 column 3 and 4. In FIGS. 33-37, the wildtype negative control is in position row 8 column 1, original gene disruption strain in position row 8 column 3, and the NaCl resistant positive control in position row 8 column 5. For FIG. 38, the wildtype negative control is in position row 8 column 6, original gene disruption strain in position row 8 column 4, and the NaCl resistant positive control in position row 8 column 2. Plates were grown at room temperature in high light in a box fed with 5% CO₂.

[0599] Random integration into the nuclear genome affects protein expression by positional effect. This effect was also observed when expressing artificial miRNA. Validation of the gene target was indicated by the distribution of salt gene-targeting artificial miRNA transformants that are resistant to NaCl (FIGS. 15-38) were also compared to the resistance of transformants of a random DNA fragment, for example, an artificial miRNA targeting a non-salt target. The percentage of highly resistant strains was a product of both the validity of the gene target and miRNA design. These results confirm that the genes represented by S7 (Augustus v.5 Protein ID: 523016), S16 (Protein ID: 195781), S65 (Augustus v.5 Protein ID: 517886), S1659 (Protein ID: 178706), S77 (Augustus v.5 Protein ID: 522165), S1666 (Augustus v.5 Protein ID: 514721), S1704 (Protein ID: 77062), S105 (Augustus v.5 Protein ID: 524679), S1612 (Protein ID: 103075), S1644 (Protein ID: 331285), S1693 (Protein ID: 188114), S1687 (Protein ID: 291633), S129 (Augustus v.5 Protein ID: 510051), 5123 (Augustus v.5 Protein ID: 519822), S289 (Augustus v.5 Protein ID: 518128), S276 (Augustus v.5 Protein ID: 512487). S292 (Augustus v.5 Protein ID: 524030), 5291 (Augustus v.5 Protein ID: 516191), S294 (Augustus v.5 Protein ID: 522637), S338 (Augustus v.5 Protein ID: 512361), S74 (Augustus v.5 Protein ID: 520845), S1613 (Protein ID: 174261), S1621 (Protein ID: 206559), S1623 (Protein ID: 116195), S1638 (Protein ID: 418706), S1655 (Augustus v.5 Protein ID: 525078) confer NaCl resistance when disrupted by insertion and/or silencing.

[0600] Phenotypes of some knockdown transformants (for strains S7 and S16) were tested on gradient salt: agar plates. 200 ml of G₀ agar and 200 ml of G₀ agar+200 mM NaCl were made. One edge of a 9″×9″ bioassay tray was set at a 0.9 cm higher to create an angle. G₀ agar was poured first and left to solidify at an angle. The plate was returned to a level position and 200 ml of G₀ agar+200 mM NaCl was subsequently poured. Candidate strains S7, S16, along with their associated artificial miRNA transformation strains were grown up in G₀ media. Approximately 1 mL of 2.5×10⁷ cells/ml culture was spread across a one-inch section of a 9″×9″ bioassay tray using a sterile loop. Plated candidate strains were spread in the same direction the gradient was poured. Wildtype C. reinhardtii was added to the plate as well. In FIGS. 12, 13, and 14, the gene disruption strains and the knockdown transformations all show a considerable increase in salt tolerance.

### Example 4

### QPCR

[0601] In this example, the transcript levels of 4 salt gene targets, namely S7 (Protein ID: 143076, Augustus v.5 ID: 523016, SEQ ID NO: 115), S16 (Protein ID: 192517, SEQ ID NO: 116), S77 (Augustus v.5 ID: 522165, SEQ ID NO: 129) and S338 (Augustus v.5 ID: 512361, SEQ ID NO: 175) and their related artificial miRNA knockdown strains were examined by quantitative PCR and salt resistance. All DNA manipulations carried out in this example were essentially as described by Sambrook et al., Molecular Cloning: A Laboratory Manual (Cold Spring Harbor Laboratory Press 1989) and Cohen et al., Meth. Enzymol. 297, 192-208, 1998.

[0602] Further validation was performed on individual knockdown transformants by quantitative PCR to correlate phenotype to transcript levels. Decreased transcript levels were observed with an increase in salt resistance thereby further demonstrating that the phenotype is genetically linked to the gene disruption. For S7 and S16, the leading edge of the miRNA-2 bands on the gradient plates in FIGS. 12, 13, and 14 were taken and struck for single colonies. Five colonies were taken. For S77 and S338, 6 random knockdown transformants were taken. Knockdown strains were grown in 5 ml of G₀ media in high light in a box fed with 5% CO₂. Algae biomass was resuspended in plant RNA reagent (Invitrogen) and RNA was extracted according to the manufacturer. Residual DNA was removed by using RNeasy spin-column cleanup (Qiagen) to ensure purified RNA according to the manufacturer. 500 ng of RNA was reverse transcribed using iScript cDNA Synthesis Kit (Bio-Rad Laboratories) and the resulting cDNA was diluted ten-fold before PCR amplification.

[0603] Real time PCR was performed using Biorad's MyiQ2 Two-Color Real-Time PCR Detection System. Primers used in the qPCR analysis were designed and tested to ensure consistency. Reactions were performed in a 25 μl volume with the 6 μl of 4 μM primer mix, 6 μl of diluted cDNA, and 12.5 μl of iQ SYBR green super mix which contains dNTPs, iTaq polymerase, 6 mM MgCl2, SYBR green I, 20 nM fluorescein. The protocol was as follows: 1 cycle [95° C. for 30 see], 45 cycles [95° C. for 10 sec followed by 57° C. for 30 sec], and 77 cycles [extension at 57° C. for 10 see]. The quantification data were analyzed using the iQ5 software. Transcript levels are normalized and compared to wildtype using the transcript levels of a housekeeping gene. The qPCR results for S7, S16, S77, S338 are shown in FIG. 10, 11, 39, and FIG. 40, respectively. As only algae that were tolerant for salt were taken for S7 and S16, the transcript levels for all six samples were decreased significantly. For the cases of S77 and S338, the knockdown strains were all salt tolerant. There were subtle differences for both cases. In FIG. 39, strains S77-4, S77-5, and S77-6 had slightly higher transcript levels that correlate with decreased salt tolerance whereas those with reduced transcript levels (S77-1, S77-2, and S77-3) correlate with increased salt tolerance. In FIG. 40, strain S338-4 had a slightly higher transcript level that correlates with decreased salt tolerance whereas those with reduced transcript levels (S338-1, S338-2, S338-3, S338-5, and S338-6) correlate with increased salt tolerance. Decreased transcript levels and salt tolerance along with unchanged transcript levels and salt sensitivity further validate these gene targets as conferring salt resistance by knockout or knockdown.

TABLE 3
Adaptor Pairs
Adaptor Ligation Method or Cassette PCR Adaptor

| | | |
|---|---|---|
| Adaptor 1- 5′ | SEQ ID | GTAATACGACTCACTATAGAGTACGCGTGGTCGACGGCCCGGG |
| | NO: 88 | CTGGT |
| Adaptor 2- 3′ | SEQ ID | 5′ Phos- ACCAGCCCGG 3′ Amino Modifier |
| | NO: 89 | |

Inverse Tandem Repeat (ITR)/Suppression PCR Adaptor

| | | |
|---|---|---|
| Adaptor 3- 5′ | SEQ ID | CTAATACGACTCACTATAGGGCTCGAGCGGCCGCCCGGGCAGG |
| | NO: 90 | T |
| Adaptor 4- 3′ | SEQ ID | ACCTGCCCGGGCGGCCGCTCGAGCCCTATAGTGAGTCGTATTAG |
| | NO: 91 | |

Adaptor Primers
Adaptor Ligation Method or Cassette PCR Adaptor

| | | |
|---|---|---|
| Adaptor Primer 1 | SEQ ID | GTAATACGACTCACTATAGAGT |
| | NO: 92 | |
| Adaptor Primer 2 | SEQ ID | ACTATAGAGTACGC GTGGT |
| | NO: 93 | |

Inverse Tandem Repeat (ITR)/Suppression PCR Adaptor

| | | |
|---|---|---|
| Adaptor Primer 3 | SEQ ID | CTAATACGACTCACTATAGG |
| | NO: 94 | |
| Adaptor Primer 4 | SEQ ID | ACTATAGGGCTCGAGCGGCC |
| | NO: 95 | |

Hygromycin Cassette (SENuc 146)

| | | |
|---|---|---|
| 3′ cassette-specific | SEQ ID | GACCAACATCTTCGTGGACCTGGCCGC |
| primer 1 | NO: 96 | |
| 3′ cassette-specific | SEQ ID | GACCAACATCTTCGTGGACCT |
| primer 2 | NO: 97 | |
| 3′ nested cassette- | SEQ ID | ACTTCGAGGTGTTCGAGGAGACCCCGC |
| specific primer 1 | NO: 98 | |
| 3′ nested cassette- | SEQ ID | CTGGTGCAACTGCATCTCAAC |
| specific primer 2 | NO: 99 | |
| 3′ nested cassette- | SEQ ID | ACTTCGAGGTGTTCGAGGAGAC |
| specific primer 3 | NO: 100 | |
| 5′ cassette-specific | SEQ ID | CTCGCCGAACAGCTTGAT |
| primer 1 | NO: 101 | |
| 5′ cassette-specific | SEQ ID | GGCTCATCACCAGGTAGGG |
| primer 2 | NO: 102 | |
| 5′ nested cassette- | SEQ ID | CGAATCAATACGGTCGAGAAGTAACAG |
| specific primer 1 | NO: 103 | |
| 5′ nested cassette- | SEQ ID | CGAATCAATACGGTCGAGAAGT |
| specific primer 2 | NO: 104 | |
| 5′ nested cassette- | SEQ ID | AACAGGGATTCTTGTGTCATGTT |
| specific primer 3 | NO: 105 | |

Paromomycin Cassette (SENuc 140)

| | | |
|---|---|---|
| 3′ cassette-specific | SEQ ID | CTGCTCGACCCTCGTACCT |
| primer 1 | NO: 106 | |
| 3′ cassette-specific | SEQ ID | GACTTGGAGGATCTGGACGAG |
| primer 2 | NO: 107 | |
| 3′ nested cassette- | SEQ ID | CTGCTCGACCCTCGTACCT |
| specific primer 1 | NO: 108 | |
| 3′ nested cassette- | SEQ ID | GAAAAGCTGGCGTTTTACCG |
| specific primer 2 | NO: 109 | |
| 5′ cassette-specific | SEQ ID | AGAGCTGCCACCTTGACAAACAACTC |
| primer 1 | NO: 110 | |
| 5′ cassette-specific | SEQ ID | CAACACGAGGTACGGGAATC |
| primer 2 | NO: 111 | |
| 5′ nested cassette- | SEQ ID | TCCTCCACAACAACCCACTCACAACCG |
| specific primer 1 | NO: 112 | |
| 5′ nested cassette- | SEQ ID | GAGCTGCCACCTTGACAAAC |
| specific primer 2 | NO: 113 | |
| 5′ nested cassette- | SEQ ID | TCCTCCACAACAACCCACTC |
| specific primer 3 | NO: 114 | |

RSO
Restriction Site Primer Sequences

| | | |
|---|---|---|
| AgeI Primer | SEQ ID | TAATACGACTCACTATAGGGNNNNNNNNNNACCGGT |
| | NO: 241 | |
| KpnI Primer | SEQ ID | TAATACGACTCACTATAGGGNNNNNNNNNNGGTACC |
| | NO: 242 | |

Artificial miRNA Cloning Primers

| | | |
|---|---|---|
| 5′ Arm Primer 1 | SEQ ID | GACTATTAATGGTGTTGGGTCGGTGTTTTTGGTC |
| | NO: 243 | |
| 5′ Arm Primer 2 | SEQ ID | AGATCTCAGCTGGAACACTGCGCCCAGG |
| | NO: 244 | |
| 3′ Arm Primer 3 | SEQ ID | GCAGTGTTCCAGCTGAGATCTAGCCGGAACACTGCCAGGAAG |
| | NO: 245 | |
| 3′ Arm Primer 4 | SEQ ID | GACTGGATCCGGTGTAACTAAGCCAGCCCAAAC |
| | NO: 246 | |

[0604] RNA Blot Analyses

[0605] The transcript expression levels of the target gene in a transgenic cell line can be detected using an RNA blot technique. The RNA extraction and small RNA detection can be performed as described (for example, as described in Molnar et al., Nature, 447:1126-1129 (2007)). A detailed protocol can be found, for example, at http://www.plantsci.cam.ac.uk/Baulcombe/pdfs/smallrna.pdf. Total RNA is isolated, separated in a 15% denaturing polyacrylamide gel, and blotted to Hybond N+ (GE Lifesciences, http://www.gelifesciences.com). DNA oligonucleotides complementing to the reverse complement of an amiRNA sequence are labeled with polynucleotide kinase (PNK) in the presence of γ³²P-ATP and hybridized to the immobilized RNA. Decade RNA marker (Ambion, USA, http://www.ambion.com) labeled according to the manufacturer's instructions, is used as a size marker.

### Example 5

### Other Methods to Generate Salt Tolerant Strains by Knock Out and/or Knock Down

[0606] There are many useful approaches to generating salt tolerant strains once the sequence characterization of the gene disruption is known. As mentioned in Example 3, the expression of an artificial miRNA led to a decrease in transcript levels. Other methods of RNA silencing involve the use of a tandem inverted repeat system (Rohr et al., Plant J, 40:611-621 (2004)) where a 100-500 bp region of the targeted gene transcript is expressed as an inverted repeat. The advantage of silencing is that there can be varying degrees in which the target transcript is knocked down. Oftentimes, expression of the transcript is necessary for the viability of the cell. Thus, there can exist an intermediate level of expression that allows for both viability and also the desired phenotype (e.g. salt tolerance). Finding the specific level of expression that is necessary to produce the phenotype is possible through silencing.

[0607] Homologous recombination can be carried out by a number of methods and has been demonstrated in green algae (Zorin et al., Gene, 423:91-96 (2009); Mages et al., Protist 158:435-446 (2007)). A knock out can be obtained through homologous recombination where the gene product (e.g. mRNA transcript) is eliminated by gene deletion or an insertion of exogenous DNA that disrupts the gene.

[0608] Gene Deletion

[0609] One such way is to PCR amplify two non-contiguous regions (from several hundred DNA base pairs to several thousand DNA base pairs) of the gene. These two non-contiguous regions are referred to as Homology Region 1 and Homology Region 2 are cloned into a plasmid. The plasmid can then be used to transform the host organism to create a knockout,

[0610] Gene Insertion

[0611] Another way is to PCR amplify two contiguous or two non-contiguous regions (from several hundred DNA base pairs to several thousand DNA base pairs) of the gene. A third sequence is ligated between the first and second regions, and the resulting construct is cloned into a plasmid. The plasmid can then be used to transform the host organism to create a knockout. The third sequence can be, for example, an antibiotic selectable marker cassette, an auxotrophic marker cassette, a protein expression cassette, or multiple cassettes.

[0612] While certain embodiments have been shown and described herein, it will be obvious to those skilled in the art that such embodiments are provided by way of example only. Numerous variations, changes, and substitutions will now occur to those skilled in the art without departing from the disclosure. It should be understood that various alternatives to the embodiments of the disclosure described herein may be employed in practicing the disclosure. It is intended that the following claims define the scope of the disclosure and that methods and structures within the scope of these claims and their equivalents be covered thereby.

What is claimed is:

1. A non-vascular photosynthetic organism comprising at least one mutation in a nucleotide sequence of any one of SEQ ID NO. 115, SEQ ID NO. 116, SEQ ID NO. 122, SEQ ID NO. 201, SEQ ID NO. 129, SEQ ID NO. 202, SEQ ID NO. 206, SEQ ID NO. 133, SEQ ID NO. 198, SEQ ID NO. 200, SEQ ID NO. 204, SEQ ID NO. 203, SEQ ID NO. 135, SEQ ID NO. 134, SEQ ID NO. 166, SEQ ID NO. 162, SEQ ID NO. 169, SEQ ID NO. 168, SEQ ID NO. 170, SEQ ID NO. 175, SEQ ID NO. 127, SEQ ID NO. 230, SEQ ID NO. 231, SEQ ID NO. 233 and SEQ ID NO. 234 or a sequence having at least 95% identity thereto; wherein said at least one mutation comprises one or more nucleotide additions, deletions or substitutions; and wherein said non-vascular photosynthetic organism has an increased growth rate in an aqueous environment containing between about 75 mM and 275 mM sodium chloride as compared to the organism without said at least one mutation.

2. The organism of claim 1, wherein said at least one mutation is in a coding region.

3. The organism of claim 2, wherein said at least one mutation results in one or more amino acid additions, deletions or substitutions in a protein encoded by said coding region.

4. The organism of claim 1, wherein said at least one mutation is in a regulatory region.

5. The organism of claim 4, wherein said at least one mutation is in a 5′ UTR.

6. The organism of claim 4, wherein said at least one mutation is in a 3′ UTR.

7. The organism of claim 5, wherein said at least one mutation is in a promoter.

8. The organism of any one of claims 1-7, wherein activity of a protein encoded by said nucleotide sequence is decreased by said at least one mutation as compared to the organism without said at least one mutation.

9. The organism of claim 8, wherein said activity is decreased by at least 10%.

10. The organism of claim 8, wherein said activity is decreased by at least 20%.

11. The organism of claim 8, wherein said activity is decreased by at least 30%.

12. The organism of claim 8, wherein said activity is decreased by at least 40%.

13. The organism of claim 8, wherein said activity is decreased by at least 50%.

14. The organism of claim 8, wherein said activity is decreased by at least 60%.

15. The organism of claim 8, wherein said activity is decreased by at least 70%.

16. The organism of claim 8, wherein said activity is decreased by at least 80%.

17. The organism of claim 8, wherein said activity is decreased by at least 90%.

18. The organism of claim 8, wherein said activity is decreased by 100%.

19. The organism of any one of claims 1-7, wherein the growth rate of said organism is at least 10% greater than said organism without said at least one mutation.

20. The organism of any one of claims 1-7, wherein the growth rate of said organism is at least 20% greater than said organism without said at least one mutation.

21. The organism of any one of claims 1-7, wherein the growth rate of said organism is at least 40% greater than said organism without said at least one mutation.

22. The organism of any one of claims 1-7, wherein the growth rate of said organism is at least 60% greater than said organism without said at least one mutation.

23. The organism of any one of claims 1-7, wherein the growth rate of said organism is at least 80% greater than said organism without said at least one mutation.

24. The organism of any one of claims 1-7, wherein the growth rate of said organism is at least 100% greater than said organism without said at least one mutation.

25. The organism of any one of claims 1-7, wherein the growth rate of said organism is at least 150% greater than said organism without said at least one mutation.

26. The organism of any one of claims 1-7, wherein the growth rate of said organism is at least 200% greater than said organism without said at least one mutation.

27. The organism of any one of claims 1-7, wherein the growth rate of said organism is at least 250% greater than said organism without said at least one mutation.

28. The organism of any one of claims 1-7, wherein the growth rate of said organism is at least 300% greater than said organism without said at least one mutation.

29. The organism of any one of claims 1-7, wherein the growth rate of said organism is at least 350% greater than said organism without said at least one mutation.

30. The organism of any one of claims 1-7, wherein the growth rate of said organism is at least 400% greater than said organism without said at least one mutation.

31. The organism of any one of claims 1-7, wherein the growth rate of said organism is at least 450% greater than said organism without said at least one mutation.

32. The organism of any one of claims 1-7, wherein the growth rate of said organism is at least 500% greater than said organism without said at least one mutation.

33. The organism of any one of claims 1-7, wherein transcription of said nucleotide sequence is decreased as compared to transcription in the organism without said at least one mutation.

34. The organism of claim 33, wherein said transcription is decreased by at least 10%.

35. The organism of claim 33, wherein said transcription is decreased by at least 20%.

36. The organism of claim 33, wherein said transcription is decreased by at least 30%.

37. The organism of claim 33, wherein said transcription is decreased by at least 40%.

38. The organism of claim 33, wherein said transcription is decreased by at least 50%.

39. The organism of claim 33, wherein said transcription is decreased by at least 60%.

40. The organism of claim 33, wherein said transcription is decreased by at least 70%.

41. The organism of claim 33, wherein said transcription is decreased by at least 80%.

42. The organism of claim 33, wherein said transcription is decreased by at least 90%.

43. The organism of claim 33, wherein said transcription is decreased by 100%.

44. The organism of claim 2 or 3, wherein said mutation results in a decrease in translation of said coding region or protein.

45. The organism of claim 44, wherein said translation is decreased by at least 10%.

46. The organism of claim 44, wherein said translation is decreased by at least 20%.

47. The organism of claim 44, wherein said translation is decreased by at least 30%.

48. The organism of claim 44, wherein said translation is decreased by at least 40%.

49. The organism of claim 44, wherein said translation is decreased by at least 50%.

50. The organism of claim 44, wherein said translation is decreased by at least 60%.

51. The organism of claim 44, wherein said translation is decreased by at least 70%.

52. The organism of claim 44, wherein said translation is decreased by at least 80%.

53. The organism of claim 44, wherein said translation is decreased by at least 90%.

54. The organism of claim 44, wherein said translation is decreased by 100%.

55. The organism of any one of claims 1-7, wherein said organism is an alga or a bacterium.

56. The organism of claim 55, wherein said alga is a microalga.

57. The organism of claim 55, wherein said bacterium is a cyanobacterium.

58. The organism of claim 56, wherein said microalga is at least one of Chlamydomonas sp, Volvacales sp, Dunaliella sp, Scenedesmus sp, Chlorella sp, Hematococcus sp., Volvox sp, or Nannochloropsis sp.

59. The organism of claim 56, wherein said microalga is at least one of C. reinhardtii, N. oceanica, N. salina, D. salina, H. pluvalis, S. dimorphus, D. viridis, N. salina, N. oculata or D. tertiolecta.

60. The organism of any one of claims 1-7, wherein said concentration of sodium chloride in said aqueous environment is between 250 mM and 100 mM.

61. The organism of any one of claims 1-7, wherein said concentration of sodium chloride in said aqueous environment is between 200 mM and 100 mM.

62. The organism of any one of claims 1-7, wherein said concentration of sodium chloride in said aqueous environment is between 175 mM and 75 mM.

63. The organism of any one of claims 1-7, wherein said concentration of sodium chloride in said aqueous environment is between 150 mM and 75 mM.

64. The organism of any one of claims 1-7, wherein said concentration of sodium chloride in said aqueous environment is between 275 mM and 100 mM.

65. The organism of any one of claims 1-7, wherein said concentration of sodium chloride in said aqueous environment is between 275 mM and 150 mM.

66. The organism of any one of claims 1-7, wherein said concentration of sodium chloride in said aqueous environment is between 275 mM and 200 mM.

67. The organism of any one of claims 1-7, wherein said nucleotide sequence is any one of SEQ ID NO. 115, SEQ ID NO. 116, SEQ ID NO. 166, SEQ ID NO. 175, SEQ ID NO. 162, SEQ ID NO. 129, SEQ ID NO. 127, SEQ ID NO. 231 and SEQ ID NO. 234 or a sequence having at least 95% identity thereto.

68. The organism of any one of claims 1-7, where in said nucleotide sequence is SEQ ID NO. 115 or a sequence having at least 95% identity thereto.

69. The organism of any one of claims 1-7, wherein said nucleotide sequence is SEQ ID NO. 116 or a sequence having at least 95% identity thereto.

70. The organism of any one of claims 1-7, wherein said nucleotide sequence is SEQ ID NO. 166 or a sequence having at least 95% identity thereto.

71. The organism of any one of claims 1-7, wherein said nucleotide sequence is SEQ ID NO. 175 or a sequence having at least 95% identity thereto.

72. The organism of any one of claims 1-7, wherein said nucleotide sequence is SEQ ID NO. 162 or a sequence having at least 95% identity thereto.

73. The organism of any one of claims 1-7, wherein said nucleotide sequence SEQ ID NO. 129 or a sequence having at least 95% identity thereto.

74. The organism of any one of claims 1-7, wherein said nucleotide sequence is SEQ ID NO. 127 or a sequence having at least 95% identity thereto.

75. The organism of any one of claims 1-7, wherein said nucleotide sequence is SEQ ID NO. 231 or a sequence having at least 95% identity thereto.

76. The organism of any one of claims 1-7, wherein said nucleotide sequence is SEQ ID NO. 234 or a sequence having at least 95% identity thereto.

77. A genetically modified non-vascular photosynthetic organism comprising at least one RNAi agent, said at least one RNAi agent comprising an antisense nucleotide sequence that is complementary to mRNA transcribed from any one of SEQ ID NO. 115, SEQ ID NO. 116, SEQ ID NO. 122, SEQ ID NO. 201, SEQ ID NO. 129, SEQ ID NO. 202, SEQ ID NO. 206, SEQ ID NO. 133, SEQ ID NO. 198, SEQ ID NO. 200, SEQ ID NO. 204, SEQ ID NO. 203, SEQ ID NO. ID 135, SEQ ID NO. 134, SEQ ID NO. 166, SEQ ID NO. 162, SEQ ID NO. 169, SEQ ID NO. 168, SEQ ID NO. 170, SEQ ID NO. 175, SEQ ID NO. 127, SEQ ID NO. 230, SEQ ID NO. 231, SEQ ID NO. 233 and SEQ ID NO. 234 or a sequence having at least 95% identity thereto; and wherein said non-vascular photosynthetic organism has an increased growth rate in an aqueous environment containing between about 75 mM and 275 mM sodium chloride as compared to the organism not modified with said at least one RNAi agent.

78. The organism of claim 77, wherein said at least one RNAi agent is a microRNA (miRNA).

79. The organism of claim 77, wherein said at least one RNAi agent is a small interfering RNA (siRNA).

80. The organism of any one of claims 77-79, wherein activity of a protein encoded by any one of SEQ ID NO. 115, SEQ ID NO. 116, SEQ ID NO. 122, SEQ ID NO. 201, SEQ ID NO. 129, SEQ ID NO. 202, SEQ ID NO. 206, SEQ ID NO. 133, SEQ ID NO. 198, SEQ ID NO. 200, SEQ ID NO. 204, SEQ ID NO. 203, SEQ ID NO. 135, SEQ ID NO. 134, SEQ ID NO. 166, SEQ ID NO. 162, SEQ ID NO. 169, SEQ ID NO. 168, SEQ ID NO. 170, SEQ ID NO. 175, SEQ ID NO. 127, SEQ ID NO. 230, SEQ ID NO. 231, SEQ ID NO. 233 and SEQ ID NO. 234 or a sequence having at least 95% sequence identity to said protein is decreased as compared to the activity of said protein in the organism not modified with said at least one RNAi agent.

81. The organism of claim 80, wherein said activity is decreased by at least 10%.

82. The organism of claim 80, wherein said activity is decreased by at least 20%.

83. The organism of claim 80, wherein said activity is decreased by at least 30%.

84. The organism of claim 80, wherein said activity is decreased by at least 40%.

85. The organism of claim 80, wherein said activity is decreased by at least 50%.

86. The organism of claim 80, wherein said activity is decreased by at least 60%.

87. The organism of claim 80, wherein said activity is decreased by at least 70%.

88. The organism of claim 80, wherein said activity is decreased by at least 80%.

89. The organism of claim 80, wherein said activity is decreased by at least 90%.

90. The organism of claim 80, wherein said activity is decreased by 100%.

91. The organism of any one of claims 77-79, wherein the growth rate of said organism is at least 10% greater than said organism not modified with said at least one RNAi agent.

92. The organism of any one of claims 77-79, wherein the growth rate of said organism is at least 20% greater than said organism not modified with said at least one RNAi agent.

93. The organism of any one of claims 77-79, wherein the growth rate of said organism is at least 40% greater than said organism not modified with said at least one RNAi agent.

94. The organism of any one of claims 77-79, wherein the growth rate of said organism is at least 60% greater than said organism not modified with said at least one RNAi agent.

95. The organism of any one of claims 77-79, wherein the growth rate of said organism is at least 80% greater than said organism not modified with said at least one RNAi agent.

96. The organism of any one of claims 77-79, wherein the growth rate of said organism is at least 100% greater than said organism not modified with said at least one RNAi agent.

97. The organism of any one of claims 77-79, wherein the growth rate of said organism is at least 150% greater than said organism not modified with said at least one RNAi agent.

98. The organism of any one of claims 77-79, wherein the growth rate of said organism is at least 200% greater than said organism not modified with said at least one RNAi agent.

99. The organism of any one of claims 77-79, wherein the growth rate of said organism is at least 250% greater than said organism not modified with said at least one RNAi agent.

100. The organism of any one of claims 77-79, wherein the growth rate of said organism is at least 300% greater than said organism not modified with said at least one RNAi agent.

101. The organism of any one of claims 77-79, wherein the growth rate of said organism is at least 350% greater than said organism not modified with said at least one RNAi agent.

102. The organism of any one of claims 77-79, wherein the growth rate of said organism is at least 400% greater than said organism not modified with said at least one RNAi agent.

103. The organism of any one of claims 77-79, wherein the growth rate of said organism is at least 450% greater than said organism not modified with said at least one RNAi agent.

104. The organism of any one of claims 77-79, wherein the growth rate of said organism is at least 500% greater than said organism not modified with said at least one RNAi agent.

105. The organism of any one of claims 77-79, wherein said transcribed mRNA is decreased as compared to the organism not modified with said at least one RNAi agent.

106. The organism of claim 105, wherein said transcribed mRNA is decreased by at least 10%.

107. The organism of claim 105, wherein said transcribed mRNA is decreased by at least 20%.

108. The organism of claim 105, wherein said transcribed mRNA is decreased by at least 30%.

109. The organism of claim 105, wherein said transcribed mRNA is decreased by at least 40%.

110. The organism of claim 105, wherein said transcribed mRNA is decreased by at least 50%.

111. The organism of claim 105, wherein said transcribed mRNA is decreased by at least 60%.

112. The organism of claim 105, wherein said transcribed mRNA is decreased by at least 70%.

113. The organism of claim 105, wherein said transcribed mRNA is decreased by at least 80%.

114. The organism of claim 105, wherein said transcribed mRNA is decreased by at least 90%.

115. The organism of claim 105, wherein said transcribed mRNA is decreased by 100%.

116. The organism of any one of claims 77-79, wherein a protein encoded by said transcribed mRNA is decreased as compared to the organism not modified with said at least one RNAi agent.

117. The organism of claim 116, wherein said protein is decreased by at least 10%.

118. The organism of claim 116, wherein said protein is decreased by at least 20%.

119. The organism of claim 116, wherein said protein is decreased by at least 30%.

120. The organism of claim 116, wherein said protein is decreased by at least 40%.

121. The organism of claim 116, wherein said protein is decreased by at least 50%.

122. The organism of claim 116, wherein said protein is decreased by at least 60%.

123. The organism of claim 116, wherein said protein is decreased by at least 70%.

124. The organism of claim 116, wherein said protein is decreased by at least 80%.

125. The organism of claim 116, wherein said protein is decreased by at least 90%.

126. The organism of claim 116, wherein said protein is decreased by 100%.

127. The organism of any one of claims 77-79, wherein said organism is an alga or a bacterium.

128. The organism of claim 127, wherein said alga is a microalga.

129. The organism of claim 127, wherein said bacterium is a cyanobacterium.

130. The organism of claim 128, wherein said microalga is at least one of Chlamydomonas sp, Volvacales sp, Dunaliella sp, Scenedesmus sp, Chlorella sp, Hematococcus sp., Volvox sp, or Nannochloropsis sp.

131. The organism of claim 128, wherein said microalga is at least one of C. reinhardtii, V. oceanica, N. salina, D. salina, H. pluvalis, S. dimorphus, D. viridis, N. salina, N. oculata or D. tertiolecta.

132. The organism of any one of claims 77-79, wherein said concentration of sodium chloride in said aqueous environment is between 250 mM and 100 mM.

133. The organism of any one of claims 77-79, wherein said concentration of sodium chloride in said aqueous environment is between 200 mM and 100 mM.

134. The organism of any one of claims 77-79, wherein said concentration of sodium chloride in said aqueous environment is between 175 mM and 75 mM.

135. The organism of any one of claims 77-79, wherein said concentration of sodium chloride in said aqueous environment is between 150 mM and 75 mM.

136. The organism of any one of claims 77-79, wherein said concentration of sodium chloride in said aqueous environment is between 275 mM and 100 mM.

137. The organism of any one of claims 77-79, wherein said concentration of sodium chloride in said aqueous environment is between 275 mM and 150 mM.

138. The organism of any one of claims 77-79, wherein said concentration of sodium chloride in said aqueous environment is between 275 mM and 200 mM.

139. The organism of any one of claims 77-79, wherein said nucleotide sequence is any one of SEQ ID NO. 115, SEQ ID NO. 116, SEQ ID NO. 166, SEQ ID NO. 175, SEQ ID NO. 162, SEQ ID NO. 129, SEQ ID NO. 127, SEQ ID NO. 231 and SEQ ID NO. 234 or a sequence having at least 95% identity thereto.

140. The organism of any one of claims 77-79, wherein said nucleotide sequence is SEQ ID NO. 115 or a sequence having at least 95% identity thereto.

141. The organism of any one of claims 77-79, wherein said nucleotide sequence is SEQ ID NO. 116 or a sequence having at least 95% identity thereto.

142. The organism of any one of claims 77-79, wherein said nucleotide sequence is SEQ ID NO. 166 or a sequence having at least 95% identity thereto.

143. The organism of any one of claims 77-79, wherein said nucleotide sequence is SEQ ID NO. 175 or a sequence having at least 95% identity thereto.

144. The organism of any one of claims 77-79, wherein said nucleotide sequence is SEQ ID NO. 162 or a sequence having at least 95% identity thereto.

145. The organism of any one of claims 77-79, wherein said nucleotide sequence SEQ ID NO. 129 or a sequence having at least 95% identity thereto.

146. The organism of any one of claims 77-79, wherein said nucleotide sequence is SEQ ID NO. 127 or a sequence having at least 95% identity thereto.

147. The organism of any one of claims 77-79, wherein said nucleotide sequence is SEQ ID NO. 231 or a sequence having at least 95% identity thereto.

148. The organism of any one of claims 77-79, wherein said nucleotide sequence is SEQ ID NO. 234 or a sequence having at least 95% identity thereto.

The application's sequence listing, which the Patent Office published only in electronic form, follows.

SEQUENCE LISTING (246 sequences)

SEQ ID NO: 1 - DNA, 9552 bp, Chlamydomonas reinhardtii
atgttcggtccaacgtggcggggctgctctcccgcgagggcggccagctgggccattcttactgtcgtgtcacaagtgcttgcgtgaagcgtgcttcgaggttacgggaagctcggctttgccttcccccatccccacgcaaccccccggcaaacaaactgttgacggcagaccgccgaagagaaatccaaggaggcccgcgccgctgctcgtcgtgagcggcgggcaaagaagcggcagggcctggagacgagcgcgtcgggttcgtcttcggcggagacatcaccgtcgcctgcagagcccacagctgcgccatcgccgaagtcggcttcggccgcctccagcagccccgcagcttcctccagctcgtcctcctcctcgaccacctcccggccgcggccgaagaagaacaccgtgtcgggcagcaccaccaccggccggaccagcagcagcagcagcagcaacaccagcagcggcaatggcagcggcggcggcgggggcttcaacttcggggctgtgggcgccacagtgctgggcggcattggagccttcctggggctgcagcagttcggcaaggtggggcatgagaggggggtgggggagggggaaagctggtgggggcagtacggtccggctgagagggatacgcggcgtgtgtgtggtgcgtcgccgccgctgagatggtccggcggatggagcggctcacaggcacacggggggcaagagcggcttgcagtatggtatgggtgaaggtgttgttggtgggaggaggagctgcggggcagggcggtggtggtcccagccggcacaggactgctcgcaagacaggcggcaaccggaaaccatgggccggtggaaacacatgtaagccagccgcatccgtccctggtcggccgggttttactgggatggttggggatgcaaaggtcgccccacttgtagactccgccggacggacgtcacgccgcacccctctcttgatccactgctgctgttcctgctgctcctgcccctgccgcagacgtcggactcctccaaggctgcggctctggcccaggctgtggagcggctgggtgagaagctggaggacaaggagaaggagaaggaggaggtcaaggcggtgctgcagagccaggtggggggagagcaggggggggcagggggagcaggcggcggcagtgggcctctgggttgcctgggttgtgtgtgtttccaggcgttgagtcttgcgcgatgtgccgcagctgcgcccgtgaggcgccgttcacgtcgcactgtgtgcggtcgtctcaacgcctgcccctgccgacacgtactgtgtgcctgctgctgccgcggccgcgaccccgccgcaggtggaggagctgaaggaggagaaggaggcggtgatgcaggcggccaagtgaggcggggttggggtgtgttagcgtgcagtcaggtgtacagagaccggagtccggggcggggatccagggagatgggatgaatgggggtgtatatggggccaccccagctgtcaggcaggcagttagtttgttgcaagttggagaggcgggcgcatagcctggaccgtgcttagttggcaacgctccgcctccattccccacctcccgccttccactcccgccttccactcccgccttccactcccgccttccactcccgccgccgccccaacctgcctcggtccccaggtcgcgcgaggacgagcttcaggcggtggcggtggagagccaggcggtggcgcagcagctggagagcgaggtggcggcggcgcgggcggccatccaggacaaggagcgcaagatgctggagctggagaagcaggtgcgggcggacgggaggaagggagggagggagggaggcggggtgcagcagaactaggctccacaagcaagaaaggggaagtgggggttgtatgcccgagccccacgtgcaggtcccattggcaacgactcgtcgggggcgggaggagggggctgaggcgctgcggggtggaatggtggcgggctctggcagaagggctgtggacgccagccccttgagaggcccgggagctgatgggacggacaagaggaggcgccggagcaggaggatgacgcgtgcttgttcgcgtggtcgtgccgttttttacgtttttactttggctctcactactactcgcattgcacgtttgcttgtatgtctgtgccgcctgtttgctgtttgagtccgccacgccttactgccgctcgcccatttcctgtgtgtgcttccccctgcgcgcgcggctctggcgtggcttgcattgctgagcgattaggtgagttcgcggggtcccggtttcgcgccgcagcagctaagctagccacctagacgcatgcactcagcttctttaccaacgagccttacttatcaccactactactccagactacttgctttcaataggaacttagtattttagcgttagccgccacggaaacacgggggaaccagcagcctgccgctggcgaaacaacggtatggaatgcgtcgcgtgtgcccgctgtacctctggacgtcggcacttcacttcatatttgatacacaccatcccatggatggctactcccggcccggctgactgggtgccccgatgagtccgacaccccaacccccatgatgacacacatgtccatacacatacacacacatacacacacagatcgccaagatgaagcagcagatctcaatcggcaaggaccagctgctggccacaaaggacatgaaggtgcgcgggccggggtgggggggggggggggaggggcagggcggggggcaggggaagcggggagggacacagaaggacagggaggggcttgaaggggaggagggacgcaccagggacggggaggggcatggagaggaggacaagggcgcgggctgcgggggtgatgatgcggcggcgacggggggtcctgccaatgctggtgtgctggtgtgtgggttggcgtgctggtggtgtcctgacttgtgtgtgtcctctggcgtgtcctggtgttccgcaggaggccactgcgctcatgacggacctggcgcccaaggaggtcatgctgcgggagctggaggcgcaggtgcgtgggtgttggggtgggggtaagggtagggacatggaggagggccttgtgaggcggccggagcgtgccgtgcgggaagaagtgtgtgcttggggctgtggtgccgcaggggcgttctgaccatgaaaacatgggacgccgaaacgcagccggccgcacgcgctacgctacgcagtgctcggtttgcagcccttgtccacccgccccctccccaccactgcctggcctcacctcctccccaggtggcgctgctgactgtggaggccaaggaggcgcgcatgctgctgggcgagcgcgaggccaaggtggcggcgctggaggggcaggtggcgtccatgcagtccattgtgcagtacagcaagcaggagctcagcctgcgcgcgcgggacgccgcggagctgacgcaggtgaagcaggagctgatgaccaaggagcagaaggtccgagagatgaagcagctggtgagtgggggcgggcaacaatggggggacggggcgggcaggcgggagttcgggggtgcggctgggtggccatggcccactgggccaccgtacgagaacgcatgaggagacccgggcaacttgcgcagccatcctgcgtccgtgcaagtactctagtcggccgcccctttgccttcatttctctctctgcacctgttccccaacgcacctacctgctccccatccctggtgctctactccttgactctgttctgtgacactcgcccccgggatcttctctctttctcttcctcttccgccccccgcagcttgcggagctgcagatgcagcagcagtccagccggctggagatggagtccatgcgcgaggagctggacagcgcccggtccattgccggcgagctggagaagcgcaacgcctcgctcatgcgcatgacgcagcagagcctgggccgcgagggcgacctcaagcaggcggtcaacagcaccaaggtgcggcagagagacgggaagcggtggcgtggaggcgggttgggggcggggtcgaagatggtagctacttgtactggcgctgctggggaatggcacggtggattggaatgaggggcacggggaatcgaggcaacgacacggaagtactagatagatggaactgtgggcaacgcattccacatgatgcgtgtggcaaaaattaggatgcccgcacccgcacctgcccacaccctccctatgcaacccctccctccccaacctgccgcccccccccccacaggcccaggtggccaagctggagtcggcggtcaacaccgccagccagcagctgcagcagcgggcgcagcagctggcgtccgtcaaggcctcgctggacgagcagacggcggaggtggcggcgcggcaggaggcgctggaggcgcgcgaggcggcgctggcggcggcccggcagcaggcggaggagctggaggccaagaacacggtgctggtgcgcagccgcagtgtggagctgggcaagatgcaggacctcaagcaggcgctcaacgccacccgggcgcaggtgcggatggcgcgggggcgagcgggcgggcggaggggcaggggtggaggggcccgtggaagtgtctgaagagaggaaggcaggagggtcgaaaaggttttggcaactagcgggttcgaggggagggaggcgacggcgatgaggtgacagcgcagcagggaactgtcccagcccaccgtgtccactcctgccgctcactgctcctcacttcccatcctccgcaggtgaccacgctggagaagcaggtgaaggaggccaacgtggcgctggccgtcaagtccgccaagctgcgcgagctggaggtgcaggttccggcgctgcagaaggagctggccaccggcaagcaggctctggaggcctcgcgcgccgagctgctggctgcccgcagcgccgcctccgacctggaggccaagaacacggcgctcatccggcaggccaccgccagcctgagccgcgagggcgacctcaagcaggcgctcaacatcagccgcgccgagtccgccaagctggacgacgagctgaagaaggccaaggccggcctggccgccgccagcacctcggcctcggaggccaaccagcgcctcaccgtggcggaggccaaggtgggagaggcggtggcagggagggagggagggaggcagtgagagggaggggagaggcagtgggtggagggagggtagccacccatgaaacacggtgtggacggcggtaccgtgctgttttcggctgctccagctctgcagcgctggcgcaacctatacctgctgccgccccgtatcccgccttccgcaaccaaccccgcatccacacccacgcacatcctcactcgcacacaggtgcgcgagacggagacgcagaaggcggcgctggtgcgcgacgcgcagatggccctgtcgcgcgccagcgacctgaagcaggcgctcaacgtgttcaaggagaagagcgccaagctggacggcgagctcaagagcgcgcgcacgcagctggccgccgccaccagccaggcccaggccgccaaccggcagtggcaggacgcggagaacgcgctgcgtgaggcggagcagcagcgcgagaagctggtgaagacggcgcaggtagcgatcaccaagtccacggacctcaagcaggcgctcaacgccaccaagcagcaggccaccaagctggagacggaggtcaagcaggtgaggggcgagggccggggttgaggggcccctggggcttgtgctggggcgccgcagggctgcggcagagggggagcagctcgcaggtgcaacaggtgtgaaagcggcagctggccgtgccacctggctagcaaccaccaccacaaatgacaccactgtatcccagaaccacctggcatcagggcatctgcagcaaccctgaccccaacccatcgcctgaacactcgtgcttggaaccccgtcccgccgctgacgctctcgggctgctgtgcgcctcttcccccgtgcgcctgcaggtgcgcggccagctggaggcggtgggcggccgcgcggcggaggcggagaagaagctgaccagcaccagctcgcagctggaggcggcgcgggcggagcgcgagaagctggtcaaggaggcgtcttccgcaatcaccaaggccactgacctgcgccaggtgggcgggaggggctgggcgggagggaggatagggggaggaagcagcggggcggggcggtcttcccacgtgccgccaccaaaagacagattgactgactcgtgctggcgcccacacacacacatgtgcggcacacaggagctgaatgccacccgtcagagcgccaagcagctgaacacggagctgtcccgcgcgcgcgagcagcagcagcaggcggcgcaggcggcggccgccagcagccagcagctggcctccacgcgctccgagctgagcagcaccgcggaggcgctggcggcggagcaggcgcgcgtggagaagctgagcgagcagcgggcgctggcgctgcgggagagcaaccagatgaagacggcgctggagtccaccaagcgccaggtggggagggggcggggaggaggggggctgtcgggaaggggggttagggtattgccgtcgggctgcccgggcccatcaaacaggagccaggggtgcgctctgcttcacacattccttgtgcggccgcaccgacaccttacccgcaccgacacaggcgacgcggctggaggcggaggtgaaggccacccgctcccagctcaaggcggcggagcaggaggcgcgcgaggcggaggagcagctgagcgcggcgcggcagacgctggcggtcacggagggcgcgctggccaccacaagcggccagctgagcgaggcggagaagcagaaggcggtgctcatgcgcgacatgcaggtgcggggggggggtttgtaaataccagcccaaactaaaccaaaaccaacgaaaacgggggtgcaggcagaggcgttagttgcaagcgataatacttatgggatgtgggccgaggcgtcgtggagtagcagggcgagcggctccggggggggcgagcaggaggcgtgggcggggagggggcgtgggcgggcaggaggcgtgggcggggggggggggcatatgcccgagacacgtgactggttgggacggggtggggcgccagccgtgcttggagggacgccggccggctgtggacgttagggtagctcatgtcgtgtggggcgggcaggacgtgcgtgggctttgtggccgtgttggggcgtgcgggcgggcgtgtggcgcccacagcagtagggggcggctgcagcaccataggaggcgctctggggcaggtggcactgcggtgccggggccctgtcgcgtcagcgcgccctcgcgcgctcccctccttgccctgtcggtctcctcttaacacgcctctccaccgcccctgataccactccgactagctgggctcccgcagtgcctggtgtttcaatccactggcctcactgctcgacccctggtgccacataccccccgccctccccgcacaggccagcctgggccggctgggcgacctgaagcagcagctcaacagcacgcggcagcaggcgggccagttcgaggaggccgccaagaagttccagggcgaggccgaggccgccacgggccgcctggcgcagcttcaggaccaggccgcagcagcagtcagccgctcgcaggtaaagggggggggggcggggccggggtgcggaggtggggtaggggtgagcgcgtgtgaggagcggttggctgcgtgtcggcatgggtgccagttgagggttgggccgcgacgcagggggcgtgtctgcgttgcggtttttgggcttggagcagagcgcaacaccgggcccaaggcgccggcgtacgggaccggacagccatcggccccgccccgcccacatgctgctgcctttggaatctcgctctccctccccctcctattattcccctcttccctaaccctcccccccccctggccacccaccaggcggccgagaccaagctggctgacctgagccaggcgctggcggaggcggaggccgtcaaggcctcgctgctgcgcgacagccagttggcgctgggcgcccgcggcgacctcaagcagtccctcaacatggtgcaggccaaggtgtcgcggctggaggcgcagatggcggcggccaagggcgaggccagcgccacctcgctggcggcgcgggaggcctcgcggcgggcgcagtcggcggaggcggcgctcaaggagagcgagagccggcgcgcggcggcggaggcggccgcgcgggcggcggagctgcagcgcgcgagcgcgatggcggtggcgcagggcgcgattgggcgcgagggcgacctgaagcaggcgctcaacaaggccaagcagtcggtgggtggtgcggcagggtagggcgggggcggggcgcaggggcggaaagggagctctgggggtggggaggaagggtgttgcggacatgtctggtgtggggtgcctcggtgacgaccagacaagcgccacctccatccaggaggggaggggctgggccggggctggagggtgacgctggacgccatgtcctggacactcgcacgctgtcggcaccgcccgtgcacacgcccacgaccctcccctccaccctctccgtctcgcctctcaccccgcagggctccaagctggaggatcaggtggccaaggcgcgtgacgccatgaaggcggcggaggagcggcgcgcggcggcggagaaggccatggtcaacatgcaggtgcgcggcggcggagtggcggcagggtcgtggctatgtgtgaagcgcagggggcgcgcgttggttggttgcaacgcagggctgaacgttgccagctgcgattgtgagagccgcggctgtcccaggggagctctggcctccggccaggccctgcgctcaccttaccggtaactcctgcgagtgcctcctgtgctgctgggcacccagccgtcctgctgccctgctccctgacgcacccccccccccccgccccgccccgctcctcccgctccccctcagggccagctgagcaacacggaggccaagttcacggaggcggcggcgcgcgtggcggaggcggagtcgctactgcaggtgcgagagcggaagagaggcgggggggggggaggggagagacacgtgaggtcagctggtggggattccaggcatggggagtggggcgacttcccttggggccttacagaggctgctttgttccctggctcgctggcgtctctcgaattgtgagtttgcgctgacgggcggcctcgctgggctgctcgctcgcaggcagccgaggacgcggagcgggcgacgtcgcccggccgggccggtcgcaacggcaccggcagcggcaacggcactgggagcggcgccagctacggcgtcagcggcagcagcgtccgcaacagcgttctcaagacgccctag

SEQ ID NO: 2 - DNA, 4309 bp, Chlamydomonas reinhardtii
atgccgtcgacgcttcaaggcacgttccacacctaccgcattatcaggcggctgggacaaggagccttcggagaggttagctcgcacctgcgtcccggcgggcaagcgccggactggacctttgtttctaccgggggcactggtcaacccctcccctttccgctgacaaccctgcacacccgccgctcgcaggtgtctctagcgggcgtactggagacgggtgaggtggtggcactcaagcgcatccacattcgcaacaccgggggcatacctgacgtggtggtgcgcgagatcaaggcgctgcagagcgtgagccatcccaacgtggtggcgctgctggatgtgttcccaaaggtcagcggggaaacagggggtttgctaggatgagtggagagctgggatgatagggataggggaatggagcccgggctgtttgaagtcctgttgacgggctaccgtttgagtgacggaagttaggtgtgccgataatcgcaccctagcggcaaagcctaaaggaccacgaggagcaaccgtgcaggggcgagtgcagctgagtgtctacacgtccgcggctgctgcatcacggctgtcgggcacgtgcgccacccacacagccagcaccttcctgctcacatctacagcgccgcgcactttccaaaaccgcacgcctccggcggctgtcccccccccccaacaccctctggacccgcacctagggccaggccatctacctggttcaggagtactgcaccaccgacctggcggcgctgctgcggcggctgcccgcgcccccgccggagcgcatcgccaaggggctcatgctgcagctgtgccgtggcctggaggcgctgcacgcagagggtgagagcggggtgggggctggggctgggggctgctttggctagggctggtgctgggcggggtgcgcagctcgacagcagggcggggcaggggctgctggcacgccagcgactacacgcaaggtgttcgcagggtgtgctcatgagcatgcatgtcctcctacctcatcccaataccggcagtgcacgggtgtatgacgtctcgccacccgctcctgcccactgacctcctcccgccgcgtgccgctcaactggatgcccgccttcctgccgggccaccacgcacccacaggcatcatgcatcgcgatgtgaaggtgcgccatgttgcgcgcattcgtcattgtgcctgctatcagacgccctaggcatgccgggcctgtcgtcacgcttacggtcgaccccagtccctgcctatcccgcccgctgcccgccccgcccgcccggctcctacccaactcccacccttctccgtgcccccccccccgcgccgtcctcctcgcagccgagcaacacgctgctgtccgccgcctccggcaccgccaagctggcggactgcggcctggcgcggccgctggacggcggcgagcggcccgcctacacgcacgcggtggccacgcgctggtaccgcgctcccgagctgctgtacggcgctcgcgcgtacggcccggcggtggacgtgtgggcgctggggctggtgttcgcggagctgctgggtgaggagggtgcgggggcagggcaaggttgctggaaggcgaagtggggcgggggtaaaggacgccatgccccaacgtggcaatgtggtaagcgatgttgagaaggggagtgagcggtgtgggttgagagagcgggaagatgactgcgttgacgtgcgggctgcaggcaaggactattgttgcacggtgcacgtgaccgcgcgcgcaccgcaaccagcaccggcacgctcccgtaccaaccctagacccatccccccacggttggcatccccactacccgcccgcgggtgttcccgcgtcgttccgcgcaggcctgtctccgctggtccccggcgacaacgacatcgaccagctgggccgcgtcatcgccaccttcggctctatggagccagtctggctgggcgtgcgagcgctgccggactggggcaagatcgccttcccgcactgcgagccgctgccgctgggcgacctgttgccgggcgcgccggcggcggccctggagttcctggcggccttcctcaggtgggcggcgcggcagagtgtcagggcggcgcggtggggcggcgcggtggggagcgccgtgtgtgggactgttgcaggattgggaatggccgtagggttcatgggggccggctggaggctgcaggaaaggagagcgcagggcgtggggatgatgagcctgttgtgtcagttgctagcgccgacacgcacactccctggccccgcctgcacacacacacactcactcactcactcactcactcactcactcactcactcactcactcactcactcactcactcactcactcactcactcactcactcactcactcactcactcactcactcactcactcactcactcactcactcactcactcactcacacacacatacacacacacatgcgcacacttgcgggatacgggttatgcacgggttcgagggtgacgggcacacgccctttttgggctgagcccccccagcgcagcgttccaggggggggcgaagcccccccaggaacacccctgtccgtgctgcgtgcgtgcgttagtatttgttaatgcctattgcatgtaaataggtggcagggaaaattcgggcggagcgagaagtgccttcgcgcgtccatggaaattgactttcgcgaggtcgcgaggaaagcatccggtgcccgccgatatgcagtctataaggcaaactatgttggcggcaagcaaagcggggaagtatatcgaaagttgtgagcgacttgctgagccatgcctgccgacgcgccagaatgccgagaagccccgaggtcgcccccgccccgcgcctagccctttgagcgtggggcgccggggaggtgttgagtatggcaggaggcgaaagatatgcgtggggtgtttcggaacgtgacaaggcacgcatgtggcgcgggaaatcccgcacgaccccaacccgagtgtccctagccgatgcgcctgcgcgtcgtagcggcatggaggctctaacggggcgttacacgcctattagctcccaagcgtacgggggctcagcccattttccagctgtacaaagctgacaccccttgtctgccagccgcgtcagccaggcccagcgtctctgcaaccgccgcccgccatccgccccatgcagtcgggcactatttgcagccgcgcggccccagactcgttccctttcacgggcatagttagtgggcgggctttgggatgcgtgttaggacattagatagcttgcttgctgcacgccgccctcttccaccgctgccatttcacatgtccgtgacacttctgtgctgccgcccaatgcctttccattcccacgcttataggtgagaatggatgtggagtggtcgagacttagggggagttgtgcccggtaaacgttgttagcgcgtcgccgacgcggagcatggcagcgcatgcgggtgcacctcggagacgaggctgaatgccaaacgcccgggtagggggttccaggcaacgtatgcgggtaagtatactcaaggtgacaactggggcaacatcggccaccgcggagctcggtaaccggcgtaggtattggtccgtaactgcgcacgcgtgttcggcggctttgttccgtttgttttgtgtttaacacacacacacacacacacacacacacacacacacacacacacacacacacacacacacgctgggtcaacgttgtagcgcgcccagggcgcggcgcatacaatgcatatgggtgccactcggggtcaggtcgttcgtcgatcgcccgagggggggttccaggctttttgcgggtaagtatgactaccggggtcgacgcggctacaagacgctcggtatcggtaggtatccgtaagtaactccgtcgcgccgtctgggcgggcttcgttttgttgttttcttttcaacacacacacacacacacacacacacacacacacacacacacacacacacacacacacacacacacacacacacaccaattacaggtacgacccagccaagcgcatcactgccgcgtgcgccgtacgcagcacctacctgaccgccacgcagccgctgccggctgacgaggccgaggtggcggcctggctcaccgccacactggccgccaacgaggcggcggtggcagcgctgaagcagcagtcggcggcggggtcggcggcgcagctgcacgtgggaagcgcattaaggcagccgcgggcggcgtcattgccgctggtgtga

SEQ ID NO: 3 - DNA, 2711 bp, Chlamydomonas reinhardtii
atggcgacccgagcagttctccagacgtttgagcggtatcagaaggagcgggtggccttcgtgaccgcggtggcagaaatggcaaagaacccgcaagtgcgttgcctctttgtgatttaaagcgcaacaatagcatattgtgctaggccagctgactgacgcggggcttcggcatgcttgcagaacatcgaggccctgcaacaagcaggagccatggcactgctgcggccgctgctgctggacaatgtaccaaggttagtaggattcagcttcatgtcgacgtgtccaacagttgggcacccagtctttcgtcgctgacacatccgcacaccgcgtgcccacagtatacagcagtccgcggccctggcgctagggcgattggcgaactacagcgacgatcttgcggaagcagtggtgcagaacgaaatcctgccgcaactggtgaggaaagggatgcattccctttggcaaaccgcgaccgcaagccgtcttaatgttttagatggtttggcttgaggacacaatccttttgtctgcaggtgtactctctgagcgagcagaaccggttttacaagcaggccgcggctttctgccttcgtgcggtggctcggcactccccagagctggcgcagtcggttattgacagcggcgcgctggattcgctagttacctgcctcgaggagtttgaccccggcgtcaaggaggcctcagcctggacgctgggctacatcgcgggccacaacgcggagctggcgcagcaggtggtggacgctggggcggtgccgctgctggtgctgtgtgtgcaggagccggagctcagcctgaagcgcatcgccgcctcggccctgtccgacatctccaagcacacgccagagctggcgcaggcggttgtggacgcaggcgcggtggcataccttgcgcccctggtcatcaaccaggacgctaagctcaagcgccaggtgcgtggcacattgcgttgcgctttgggtgcttgggtccgtggggttgtgcgtgtctgtcatcatggtatcccgtacgtagggaacagttgccacaggctaaggctcggcaactgtgggcgctgatgatgcagtactatgccgtctatgcgctgatgctattgcaaatacgtgctggtactcgcaagggctgtcagcacttcgaggcatggtggcaataggttgtcgtcagccgacccccctgcatgcacacggaatggcatcgtatgctccgcacctacgcatctagcgaccctgcgcttatccttgctcggccatggtccacctccccaacctcatccgttctcattgtgccccccttgacaggtgtgctgcgcgctcagccagattgccaagcacagcgtggacctggcagaagtggtggtgggcgcggagatcttccccaaaattctcacttgcctcaagttcccggacgagttcgtcaagaagcacagcgccacggtggtgcgcgaggtcgccaagcacacacccgagctggcgcagctggtggtcggcaacggcggcgtgggcgcgctggtcgactatatcagtgagtttgctcggggggcgtatagacggagctgtgggcttatggaatgggctcgcgggggaggccgagagggcgcttgctccatggctcgcggtctaggtcgtcactttggcaccgggtgtcgacacgggtgcaacacaggcggcctaaacatgcggtcaggcagtttgtacggaggggcagcggacaggtcgctgaacatgttgctggcacttagtcacgtacccaagcatggtgggaagatagctgctctgccaggcgcgcatttactcctgcatgcggccgctaatttccctccgctcctacccgctcgccccgcaccacaccgcaccaccaggcgactctgcgggcaacaaccggctgccgggcatcatggcgctgggctacatcgccgcgttctcggagacgctggcactgtcggtcattgcggagaaggccctgccgccgctagtgtcggcgctcaacgaggagccggaggaccacctcaaaagcgccaccgcctggacgctggggcaggtgcgttctgggactttgacgcagacggccactcttcgtgagacagcaacgctctggtggacgccgggaatgaagggcttttgtttatgcccgccggcagccgcacaccgcatgcgcagcttttaccctcggcacccgtgcctagacaccatctcactcgccccgctcttgtgcgcacgcttcgtatcccgcagattggccggcacacgcccgaccacgccaaggctgtcgcagacacaggctgcctggcaacgctggtttcgctggagagcgacggcgcctccagcgacgacctcaagaccaagtgccgccgcgcgctcaagtccgtcatcgccaagctcacgcacctgcccgcgctggacgcgttggtgcaccggcaactgccggagagcgtgatgaagatggtgctggagcaggtgggcaaggtgctggccaacgacgcggcgggccgcgcgcagttcgtgcacagcggcggcctggcggcggtgcagcagatggcggaggcgcccggcagcaagctgaaggaggcggtggagatcatcaacagctgctaccccgaggagattgtcaagtactacagccccagctacagccagcagctactagagaagctggagagcatggccgcaaccactacggcgtactaa

SEQ ID NO: 4 - DNA, 5189 bp, Chlamydomonas reinhardtii
atggggagcttgggccatgaagcagtcgcagcggcgcagttccgtgccgctgagttggcgaggcgaacagtggtaagtggggttactggtcagacatgccgggatggcatcgtgaggtcgccatgggaatggttctgggcgcaagcggagtcgcgggtgcgtgggggactgcgtgcctgtgcccgtgcactcaaacgtctgccgttgttttatcttgtcacgctttcccctcgacctatgcaccagcccgttacgttactatcttgcgcgcctctgtaactctgatgtaccatgttgcacaggaataccatagttcccgcgagggtgagcaccgcgcacgcgaccgcttgggcggccgcttcacgccctacccctgggccgacgcggcggcggcggtgctggcagatgaggtgctcgaggacgaggagctggtggtggcgctgatccgggagctgggcaggcagggtgaggagggccaggggcgcagcggcgcggccagcttcaatgcgctgggcaccgacggggaggtcagcagcagacgggcaaggacgggcaactggcggctgccggcaaaagtctggtggcagtagctgcagtaggggcagtgtacagcagcggcggcagatgggcatacaactatgaaaggatcaccagcgcaaagtgcatgggaacttgcgcggatcgcgcagctggcagcagtatcttcctttctagcccacctccctccggctcttgccttctctcttcttcccaccaggctgctctgaggtggcggtggccgcactggacctggtgctgtcacgtgccgggtctgacggggacggggccggggccgggccgggcggtctgccgccgagcaaggggctgttcgactcggcgctactggtgtgcgcggcggagtaccaggtgggttgggcgggggcgggtcaggccggtgccctgtgccaggggccaaggggccggtatcagccgcggaccacttgcagccgctggccgcgccctgcctggggccattgggccatccatctggttgtaatccgcttgctcgaacggcgccgtgcgccgtcgggccctttcacactgttcttggttccgtttgcttacggaccgaaacatctgcccctaccccctgcccaccccctcacgcccgcaggatgagcgttgtgtggccctgtaccggcgcatgcggcaggcggggctggcggcggacgtggggtcactcaacctggcgctgacagggctgtgctgccggggacggctggaggaggcggtggagctgctggagcaggaggtggaggacagcggcggcgtcatcaagcccaacagcttcacagtgctcatgatactgcaggtgtgtgtagttggagggacaagtgtacggcatggacggaatactgtgtgtgtgtgcgtgtgtgcaggtgtatgggagttgcggggcaagaggtgctgccatgaaagcagcaaagccatgcgtcatgcctccccttccagctacctgcacgcaacagcctctcagctgcttctcggacgccaagtcgttcgtaggcgctgctgcgcctccaaaccctactctgaagctagccctgggacctaaagcgatgattttgctcgtggtgcttgctgtaaatcgcaggcgtgcaactacaagcggcgaggtgcctaccgggaagccatcgacgccgtgcgggtgcggtcagcatatacatatctgtgtacgtccttgctcccacggcccacctcacgttcgcccttcgcagagcccagcgacttatcccccgcccccccacccgccctcacccccttgtctcccccaccccccgcctgccgcctgcaggctctagagtcgtgggggcggcccgccaacgaggaggtggtggaggcgctgctgtgtgtgtgcgaggctgccatgcacaaggcgcccagcttcgaggcggcggtggaggtgttcagcgcgctggcggagttgcagctggcggacagcacacgcgtctacaacggactgctgggcgcggcggggcgggccggcaggtggcgagaggcacaggtgcgggtgcggggtgcagggtgcggaatgtggggtgcgcggctcaagtggagtcggcagcaagtgtgggattgtctttgccactttggtggcgttgtgtgccgtcgtcatgtgtgtatctctgcactacactgaagttctgcactgtagctactatacagttagaattcagtaaattccttcctcccttgctcttcccctggttatgccacacgctcgtgtgtctgccccacgccaggcgctgtacattgcgatgcaggcggacgacatccccgccagcctggagacacacacagccctcatccaggtgcgtgtgcgtgtgcgtgtgcggccctatgcacgtgggggcactggggggcagtggggcggggcagccagccttgcagccaggtggggctgggaaggacaagtgggaagacgcaggccgttggtgaggcgcaagtgcgcatgctcacacggtctgcctggctgcttggccttccctccttgccttcctcttcctgtcaggcgtgtgtggtgggccgggctctggaccacgcactagacatattcgagttcctggtggcgggccgcgccgcgcacgagctggtgccggcgtccatccagacctacaaccacctcattcatgcctgccaccaggtggggcggggcggggcgggctggcgcgaagtgtgaagcgagtgagggcattggttgcacgaagcacgtgttgccgcgggtctcttgcccaacaatacgccccccgccgctgccgccgccgccaccacctactcccgccctcactaggccggcatgctggagaaggccctggagatcgcggcctgggttcagaagacgggtgtggagttcaacgacgagacgtacgaggagctgatggccaccattgaggtggcgcagctgtgggatgagaaggccatgaagcaggtgttgatgtgtgggggagaggccagtcgtgtgggcatcagagtatgcgcattgggcaaggggctaatatgcccgggcccaacgagtaggtgcggatgccggatggtgtcggggtgacaccagcccatgcacaacctgccacgtatgcgcgcgagtctgcgaaagctgtcacgaggtgcgctgcagctcccaaccccactgtttcactcccatttcgccgtaacggctaccctcctggccgtcctgcccctgcccccccacccgcaaccgcgcaggccctgaagcgccacccggctgtgctgcccaagcacctccggcccgcgccctatgacgccatgcgggtgctgtacctggaccacctggaggtagggggggggggagggcaggagggggcggttagtttagtccaatcccaactaggccaacacccagaggaagagcggggatgttacttaaactcaaggctatgccagtaaggtcgacactatgggcataggagggggcgttggcgtgtgttgtcagtgcgcggtggggcactgtcgtcgaccccaccccttgggcgcgctcatgctcggcggaacgtctctgtcgggccctgtgctgtgtgtagttcggcgccctaacccctccggcccagtcctccccaccgccccctgtccgcgtccacacacccccgcagactctgcagcaggaggagctgctggcgctggaaaagctgggcacactgggcagctgggcgcccaagtcgctcaccaagggcctcatgggcgagcagcacgagcagatgatgcgcgagcagcagcaggcggcgggcgcgggcgcgggtgccggcggcaactggacggcctcggcagaggcctccagctggcgcggggctggcgggctcggtctggatgcggaggcgtccactgcctcggtctcggtctcggccccgggtccgccgctgtcgtatcgggacatggccgcagccatgcgcgcgtccatgcccgctctggcttttgggggcggtggcggtggcggcggcggcggcggcggtggcgcggcgacggcgctggcggccgtgtcaggcgtcgtcgggctgggcggcgagtcgtctgttagctccctggcaggcggtggcggtccgccggcgggcgccccctccatgcggcagctgctgaccagcatgtccatgaagcggatagcgggcggcggcaatggcggcccgggggcagggtcagcgtcgacggcgctgtcgttcaggtgggggggggtgtccatgaatgacgcgggggttagtagttcatgcggaacgggttagctaccgtattcatgcgaacgggagggcgataggaaaaggcagacaaggtgggtcagccgcgagtgaagcggttgtgagtgcacggggttttgaatctggaggccactccagtttctgctggcctctaacgctctgccaatttcgctggtactgcacattggaaacccctgcagagcacctggcatgcggagtctgctaggcgcagcaggagcagctgtgccagactcacctactgcctcctcagccgccgccagtgcctcctctcccgccggcgcagcggcaacagtaagctcgcagcagctgggagcgggcggcggcggctccgaacctgcacccaccggctttaaccagccgcccacgtgggcgcaggtgcaggtggcggacgcggccaccgcgggccccggcggcacgccctttgtgacgcctcaggcggcgtcagtgcgggcctcggcggcgggcaccgtgccgccgctgtcgctggggtcgggcctggcgctggcggtggagcccgccaacctgcagggacagccctcggccggatcgctgggcggcacaccccgcgtgtcggcgcgcggggtggcgtcgagcagggcaaggcctgtgccgccgccggtcgcaaccgcgggatcagtgggtgccggcggactgccggcagtggccggggcgggccagggtggcggcattcatgcgagtgctggtctgctgccgctggcggacgcgggcccagcgctgggcagcccgcggggtgcgggcgggccactgccggctgcggcaggcagtcggttgcgggcgctcaatcccagtcttcaagtggcggtgggcggcccggtgtcgcatgacttcctgccatcacctttgcccactatgccacccacctcattgggcgccggcagcgggcggcggccgggcggtttgcggtga

SEQ ID NO: 5 - DNA, 34698 bp, Chlamydomonas reinhardtii
  misc_feature (18582)..(18866): n is a, c, g, or t
atgcgggtagggggcggcagtggggctgatggcgctggtgccgtgtgtgtggcaatggcctcatgtgtcgggtcggtcgggcacccctgggagccgggcgtggtgatgaggccttggtgggctggcgggtgcggcgtgattgctgcgtcctgacccccccaccccccgccccgcctgcagtcctcctcgtgcatcctgtagcgctttcccaaccatctttgcaacccccctgtgtatgtatttgtgtgtgtgtgtgtgtgtgtgtgtgtgtgtgtacctgtggcccggggtgccgcacgtgcaggcgctggtgggccggctgcaggcgctgctggagcagggggcggcaggaggcggaggaggcgggggaggtgggggcgctggcgaggaggcgggggtggcgggcgaggcgggcgggcgggtggtgctgctggcggcccgtggcgtggcggccatggcggagccggtggcggcgctggaggggcagcaggtgcgggcggggcggggcgcgggggcggggcaatgggatatttggtgctgaacggcttagcatgggtggggcggggataatgtgtgtgtacggcggggcacaggggttggtggggttacggtttgggtggggttgaggcgggtgcgggctgcgcgtgtcagcttggacgcgtgtgtgtcttactgccaagagagacacggccgactttgttgcggcgcgtggacgatcgccacacgccaaccaaccaaccaaccaaccaaccgtcacatcggttaaaaacctccgcgctctaccgctacctgcctacccgctacacacgtgccgacagggcctggcggcgctgcttcgctcgctggcggcgcgcgccgccgccgccgggccgccgcttcccgccgagtccgagctggcggcactgccccccgggtcggtgctggcggcggcggaggcggcgccggcggctgtgtacgacagcgggagccgggtggaggcggcggcggtgctggcggctgcggtggcggcggtggcggcgcgggggccggttctggacgacgcgggtgggcggctgctgcgggagctgcttgagagggtggtgggtgagtgacggcgtgcgtgtgtgtgattgtgtgtgtgtgtgtgtgtgtgtgcgtgtgtgtgtgtgtgtgtgtgtgtgtgtgtgtgtgtgtgtatatgtgcatgtgtgtgtttgtgtggagtgcacccacctcatttccctccccctgcggccgcccggacggccgctcatgtggtaatgacttcgtctgcagtcttcggtgcatcctgtaccgcttttccaaacacccttgcaaccccctcccccaattcaccatcaccgtcatcatgcctgaagtttcctccctccacccttccccacccttccccacctggcctgctacagccggctactcgctggtcgcggccatgggtgtgctgcagcggcgagtgcacggcgagctggcggcggcgctggcggcagtagcagcgcaccagcccgcccgactgccggcgctgctacagccgctggcggcgctgctgctcagcctgtcgctgcagcagccgcagctgcagccggacggcggcgtgggcgcggcgctgggagatgcgggcggcggaggtgaggggcgggcgggcggccgcgcctgttgccgtgccagggatacggctcgccatctgtgtgtgtcaacctctgtgtcctgtgtgtgtgtgtgtgtgtgtcgacctacgtgccatcccccacctgtcatccggtcattcatccacgccgccttgcaggtgcgggtgcgggtggcggcggcacggcgctgctgccggactcggaccccgagcagcaggtccggccctgggaggtgtacatagagctgtggcgggcgctgctgctactgccggtggggcccggcggccgcctgggcagtagcagcggcggcggcagcggcagtagcagcggcggcttcacggccgagatgcaggtagggtggggtgggggctgtgtgccgtgtgtttgtatgactagcatgtgagatgggaccgggggaacggcgtgggccgtccactccatcaccacaccagcgcaatcttacacaaggacacaggctgggctgtatgtatgccttcattcttttccttgtgctcctccctaaaacacacgctgcggtgggcccgtaacccgcggcctgcacacatacccaccgccctcgaatcccaaccccgcacacccgcacccgcacccacacccacacccacacccacacccacacgccttcgctacaacccttccgccctccccccgaaatgaaacaggcggagctgtgccgcacctatagcgccgccacccagcgccgcctgcgtgccgccgtgtacgacgccctcatatccgccgtactggacgccgcccgccacttggacctgtcgtacagcctgccgccgccaggcggcacgggcggtacggcaggtgccggttacggtgatgatggggatgatgatgcggcggttggcggcggcggtggcggtttgacggttgtaaccgacctgtacggcggcctggtggccaacgacctgtacgacatgatggccttcttccacatgcgcggtgaggggctgggtgggggggggtactaccgtatcgcgtggggtttggccatgtggggctgcgtctttggctctgtagccggctgtgaggttgtgagctgggatgcaggtgctcctatgccgcatagccacctggtcatcagcgtcgtgctcatcctcaaacccctctcccccccttatttggtaccggcttcgtcagcggtcttttgtgcatcctgtaccgcttttccaagcatccttggcaacacccaccccctatcccctcaccctcgcagattttctgggcgagctgctgccggccgccgggcccggcctgttcgcacgctgggcgctgccggcggctgaggcgctgtgcggcctggcggcggagcggcccctggtcagcgccacatacaggtgcggaactgcgcgtgtgcgcgtgtgtgtgcaggcacgtgtggcacgctgggcgcatgtgtgttcgtttggctgtggcttgtgctgtgtgtgtgtgtgtgtgtgtgtgtgtgtgtgtgtgtgtgtgactacggtttccatggtttttctgccagatcacgtgaatcgtgtatctggtataaccaacgacagggctctcaatcgagggctgccgtgacctggcgtttccccggcagagcgcaaccagctctggagtccacagggcaacgcactccgacccttcaccgcgccagtaatccttgcggaattactaccggtgtaacaacctcagacccagcgggcgagctacctcttaaaaaccaggcgggcagaagacaaaaaacagcaaacataacaaaacacgcagcacgcgacagcacgcgaaagcacgaccacagtggctgcggggctgagtcctacgacccggcagcctgcacgacctcaaccgcaacctaaccagctctcgacgcaagggcagacaatgcctaagggcagccacaaacgcgtctggccactaggccggtccaggccgtaagacccggggtgttgcagcacccaatacaccctctcaggcattaaaaccccgcaaacctggccctgctcccacgggcgtaaaacaaaagacccttcgcctgcccactaagctcccccgctgaccctctcgtatgccactgcttcagtggctcatgttagtgctcacgcgcttctcctaagggctgatccctttcaagcctccagctccatagcttgcggcatcgcgcacagcatttcaccgttcaccaccgccaggatggggtgagtggcgtcaacaccatcccaacccttttggggcacgccgagctgcgcgaactgcatcagccgcgaccagaagtccgcgactgcacgagcgcacgcaagctcgacggggttgacgcctggctgcggcggcgtcagctgtgtgggcgggatctcgtcaagatcgggttccgcctccgctgcacctgccaccgcagcctcgggagctgctgccgccgccgtctgaattcccagggccgctgcggcgcgcgtcatcccgcgcagccgcacccggccatgttctgtggcggccagcgccgccatcaccaccacgtcccaaacacactgctgaaaacccggcggcgcctgaaccagccacagctgggcttggctgatgggagccggaccggggttgtgtgcgttgatctgcgccaccacggccttcgccaccgcgtgtgtgtgtgtgtgtgtgtgtgtgtgtgtgtgtgtgtgtgtgtgcgttgtgtgcgatgcgtgtgcgtgtgcctgtgtgtatgctcctgtgtgtgcgcctgtgtgtgcttcgcaaggcgcgagtaatcatgaatgtaaccctcccctctgctcctccactcgtcctcctcctgctgctgctgctacccagtctggccaaggtggccatggatttagcagaacaggccggagctctggcgcccccacccgccacacccgcagccgccacagccgcagccgtagccgcaggaacccgtcgctacggtggcggcggcgcggggggcgcaggtgcggcggtggcggagcaggaggaggaggcggacgtggcggcggcggcggcgcgcgcggcggcggcgacatcggagctgttccgcggactgctggcggcggtggcggcggcgtgtccgcattacaaggtgtggcgctaggggctgctgtttgtggttcaagggctaggctgccccccgaccctgacctgtccggcccaaaccacctcatgcaccgcttttccaaccatctttgcaagcccatctccttcctcacttaagcgtaacactccctcgcactgcctcactccttcacacacacactcggcccccacaggacgagctgctggtgtgctgcctgcagctgctgctggcggcgccgccgcacctgctggcagcagcagcagcagcagcagcagccggcagtagcaccagcactagcggcggcagcagcagcaccagcagctacagcctctctgctacagccgccggccagggtctggcgctggcgctgcggctggcgctgccgctgggactgcagcaccttccggtggcggcggcggcggtggaggcgctggagcggtgggagcagcagcagccggcggcgctcagggtaggggcctggggccgggccgggttgagcggccggcgccctcggttacgaccggtcgcggatgctgtgcccgtgtgtgttaggtcgttcgcatatggaagttgtcggttgtttatgcaagtgttactcggctcactggttttgggacgccgcgaaccgccgccaaccgccatcagctgctgtaccgccgccccatccccaggccgcgctgccgtactttgtaccgctgctggagccgtacctgtccgagcagtccggcgcggcggcgctgcaggccgaggccgacaacatggcggcggcggcggcggcggagcccggcggcggcggagcaggcggcggcggcttcggggagggtgctaagagcggcgtggcagctgctcgcgccagccgcgccgccaaggcagccaaggtgcggcttggttttgttcatgcaaggatggttgggaaagcggtacataatgcacggaaccacgggggggggcagctcccggtgttggggggtccgggcggctccgggccctgcggcgtgtgcgtgtgcgtgtctgaccaccctgacagccccggccgcgctgccagcgctggcaactccaaccgccgctgggtctgcctgcgtgccgcctgacccactcgctcctatttcgttacacacacgccccggcggcggccagtgggggcatggccgttggcagcatggcgctgacttgtgccgcatggcgctgacttgtgccgcatggcgctgacttgtctcttgtgccttcctcgaactctccctccctcctggttctgttgggctcgggctgatgaagcccaccctcccccgccccatccaatattacatgaatggctacacacacacacacacacacacacacacacacacgcgcgcgcacacacacctgcaggccgccgcgccggacgcggcctccgctctggagggcctgcagtgccggctgcagctgtggctgggccgcaaccccgccgccgcccgacacctggtggcggtggacctggcgtcgctgctactgccggcggcggcggctgctactgctgacaccgcgctcggcagtagcagcggcagtagcaacggcggcgtggtcgggcctgcggcgcagcggctgctgcagcagctgccctgggacacggactcgaccaaggtggcgttgcgggtggcggtggctgtagcagcgccgccggcggaggccgccgccgacggcggcgcggacggcgcggcccccgacggcagtagcagtggcgatggcggctggagccgagtggtgttgcacctggacctgctactgccgcatgcggcgcggctggcggaggagagcccggcgccgcaggctcggtcggcggcggcggagctgctgcacgcggcggcgctgtgggtggtgagcggctgtagcggctctgcgtccgcgtgtgccgcagtggaggtggtacagctgtaggggagcaggggtgccagacgcttccgtcactcgtaacaagaccgctcaatcacaacgaaatccgcaccgccgttgccgtccgcaccattaccgttggcctctccgtgtcccttacatgtgtgtatatgtgtgtgtgtgtgtgtgtgtgtgtgtgtgtgtatgcttgcaggtgggagccaacgccgcggtgcctgaggaggggcagggccgccgtgactacgagtgagtagcgctgatgggagggagtgggcaggcgcggagctggcccggacggcggtctatgcagctagccccacgtctcaactccacttccccactccttcatttctcccacacacacagcgctttgttttcctaatgcttttaacacacatactgtacacacacatatacgcccacaggcggcgcgtcacgcgcttccagccgctgctggcgcggctgtttccggtggtgctgcggctggcggcgggtcccgagcccctggcgcgtgagctgttccggcggctggcggggcagctggtgcactggtacacgcggtgagggagggggcgagggggaggggagggggagggggagggcggaattttggggcatggctactgcgcattgcgtagcgccccggggattgacagtttagcttgccgtttgaggggctacactcgaaagacctctgctccgcttcatgcttgattgcaatcttactccctgacccgcgccctcctcccttcgtcccgctgcaccccaccactgcaccactgccccaccccaccaggggcgcgcggcgcgagggagctgaggccatggcgctgctggaagccgtcctggctggactgtgtggcggcggcggcggaggcggaggcgggggcggaggaggaggcgggggcgggggcgcgggaggaggcgcggggtcgctgcgggacctgtgtgcggcgctgtgcgcggagtggttcacgtgggctcagaagcagaacctgggcagcggaggcggcggcggtggcggaggcggtgaaggtgcgcaggtactccaacccaagcatgtgcctcgaccttcctatgctcctttgcccttcccatgcaccttcccatgcaccacgtagtcgtgactgacgcaacctaaccctattgtgtgtgtgtgtgtgtgtgttcccgtgtgttcccgtgtgttccgccgccagccacctcctctgacgccttcgtgtcggtcaacgccgccagcctgctgcgccgcctgctggacagactggcgcagcccgaccccggcgtgcggcgcggcgcggcggcggcgctggcggcgctggcccggccgctggcggcgccggcgctgggcggcggcgcggcggcggcgggcggtgtgctgctggaggcgctgtggctgctggcggcggcgttgaggcacccgctgggtaggcgtgtgtatggcggggagtttgcaaagatgtacaggatgcaccggtagggtagacgcgcattccgcggggaacggagtgattaaaccccaacgcccaatcacgcagcggacgagggcggcgacggcggctcctcctcggctacagccgccgccggcagtagcagtagcagcaatactgccaccaccaacaacaacaacaacagcggcggcggcggcgcgggcggcctgggctacggccccgccctgtcccgtgcggtggcggcgctggtgcaccactgcctcacccgggagctggcggaggagctcacgcggcccctgcccggagaccccagcctgctgctactgccggctgcggctgctgctgctgctgctgctactgcggggaggggtcgtgggtgtgctactgccggggctgccggactgagcgcggcggctgaggactatggcgacggcggcccggacgcggacgtggagtggggcgaggaggaggaggacgcggaggcggcagggggcggggcaggggatgtggagatgcgggaggcagggcagcagcaggggcagacccagggcgggctgggtctggggctggggctgtcagctgcggtggtggtggtcccgccttacagcacactgcagacgctggtgctgtggctgtggaaggtgcgggggcgggggggggcggtttgtgtgggcccgtgctgtgtgtgctgcgtgtgctgtgggatgtgcggggcaccacctgaccaccttgtgcttaagcgcgggcatgcgtgtcgtgtggaggtggcgaccccaccccccggccccttccgtgccatcgccgtgtgtgcctttgcaagtttgcggccgaatcccgggcgttgcgtgcccacatgcttcagggcacgggcggcctggcggcggcggcgggctcggctgcggcgcggcgtgaggcgatgcggctgcaccacaggctggcgggggcgctgctggaggtccgcgcacaggtggggggcggagggggcgtgggtggggggattggggcgtggggggttggggcgtgggggctggggcgtagccgggggatgaagggtagataggaggcaggggacgtagccatgtcaggtcccgctagttatgcctacgccaacacccaaacacatatacagccaaacagccaaacagccaacacccaatcgtcaaacacccacacctcgcaggaggaacgcgaccggcgcatcaccgaccgcggcggcggcggcggcggtggcccccacccggcaccgggggcgggcgggctgctgtcccatatcctgatgatggggggcggctcacaggagggggaggaggaggaggacggcttgggcagccacggagcgcacggggatcacggcggcggcacgggtgctgctacagccgctactgccgctgctgctgctactgccagggtggagcacgcgggccccgcctgtgcggcgctggcggacctggggcggccgctgggctacagcgcctgctgggtgagctggcgcgtggcggtgcgctacagccgtagcggcagtagcagcagcggcggcggcggcggcagtagcagcgacagcgcgcggctgcggatgctggtgccgttcctgctcacgcagccgccggcggcggcgctcacggggcccggcggcggcggcggcggcggtggtgcggatggcgcagaggcggcggcggcgggggctgctgcgcggtgccgcgtgtggctgcggtctgtgacggcggccctagactggatgcgttgggccctggaccaggggtgcgcgggggcgggcgaggctggggcaggggcaggtgcggagaggttggggaggttgaggccaactgtgaccgcaagttccccccaccgctgcggtcaccgtcatgggcgctggccgccagtggctgctgtgccacgaggcgcttgcagagtcgagtctgccagttcgtctcccgagtcgctgagttgccacgtgtgcctgtggctgtgtgcctgggacactgtgcctgtctgtgtgcctgcttaccactgcctgcctgcgtggctgtgaccgccccggccgcctcccataagtaatatcgcttgcaactaatgcctctacctgtgctccgctagtttagcttggtttggattagtttgaggctggtgcttacaaccccctccatacccgcactcgccccccccccccacacacacacagggtcctactggccgccgaccttcccgacctagtggacatggcccgggaccgggccgcccgcgacacacaggaggcggcggcagcagcagcagcagctacagccgcagcagcaggagtagctggggaggaggacgaggcagaggactggagaatgcgaaggaggaggaggcgcggcggcgcgcccccgcagccctgcgccaccctgcccgactccctgcttgagctgctgtgccagctgccgccggtggaggaaggcgtgagcggcagtagcagtagcagtagcagcagcggcgcccagggcggcggcagtagcagcggcagtagcagtttgctgctggccggcgccgggtgccgcggcgccacgcgggacgcctgcctgtcgctactgcggctgatgcaagcgctggtggagctggaggcgcaggctgtagcagcagcagccggcagtagcggcagcggcggtagcagcaccggtggcggtggcgctgctacagccgccgctggcgacagcggctgcgactactgctgccccagtgaggcgctggtgccgtggcgggaccgcgacactgccaatgtggtgctggcggcggcgctggccccgcacgtggtcggggcggcggcggcggacggtgagggagggcggtggcgggcatgcatcgggcttggagtgtcgagggattgcgcttgggctgagggatcccatgggctgcacatcagctattacgacaccagcggctgttggagctatcgtagtcttgtgtaagcggcttggtcgtcctgggcatggaatcatcaacaggccatgcacagggacctcggcagccctctgccggcgttgttcagcccggcgacacagcagcagcaggacagcgacaggggtcgccaaagggcaggaacggcgctgccagccctgccgtcgccgccgcacgaggtagcggtgccagcggcccagggcaggcgggccacgcagggcagcaaacagcggcagcagcagcagcagctgcggccccagcccgggccagacctggcgcatacgttatgggacctggcatgcagcatcttggacggggctaagcgtaacagccaaggacagccttcccgcaactgggcacaagcttcaagtccttggcgtttatgcttggccttgcccaagatgctgcatgccatgccccataacgtatgcgccaggtctggcccgggctggggccgcagctgctgctgctgctgccgctgtttgctgccctgcgtggtccgcctgtcctgggccgccggcaccgctaccttgtgcgcgaagggacgcaggaacatgaagcgccgtcgccatcgctgaggggtccatcggagacgccagtgccccatcccaaactcatcaatccaattaatttcatcatgcagctcacccaacagtgccttggcttaaagaatccattgttggtgttctcgtttttgacgtatgcagtcgcggcgcgacgtgagttgacggcgacggccgcagcgcttgccggcgctgccgtgcgtgctgccggcggcggcctcggacacggcttccggcctgccgggccaggcatgggcggcagtagcagcagcagcagccatgcgggcacgagcagcggcagtagcagcaggggcgcggcggggccgctgactgccaccctggagggtgggctgcgtgagctgctgcggcgcacgctcgactcggctgctactgccctgggcgctggcggccgccccggcatggcggctggtggcggcggcggcggcggcggcggcggctggggcgaagccgcggaatcgatggaggtggatgaggtgggtggcggtgaggaggaggacgaggaagaggaggacgaggagggaggtgaggcggaggcggctgccctgggactggggctggggctgcgggcgtccggcaagagcggagctggagagccggcggacgcaggagcagcggcggacgaaggagcggcgacggcgcgtgtggaggcggcggcggcggcggcgcatgtggaggcggcgcagcggcgtgcgacggcccgggcgctgcggctgctgggcggtcgggcggccatgctagcaggcgacccactgcagacgtccgccttcctgacaggtgggggcggtggggctggcggtgggggtggtggatggcggtggttggggtgggggtgggggggctgcggacagggggcgagtcaagggtgggaggcgcgcgaacggacctgctgtgatggggggcggggagtggcgcctgaacagaggcgtgtgtgggcgcgcttgctgcctgtgaacgctccttttccccctggtggacaggcctgtccggactgctggcgctgccctggcccgccgcctccacgaccagcggcagcggcagcggcagtggcagtagcagcggcagtggcagtagcacctccctggtgccggagccgctgcgggtgcggctgcggggccggtgtctgcagctggcgcggcggctgccggcgggcggcgaggcgtcgccggcggcacgcaaggccgccacaggtgcgaccggggtgcacagggagggacctcgctgtggtggtggcggaggaacgcggcggcacggccgtccgtcttcttgcagctgctcgttagtcagttccgccacacaaccattgtgcacactcacagctcacactcatactcacagctcacagctcacacacacactcacactcactcacacacacacacacacacacacacacacacacacacacacacacacacacacacacacacacacacacacacgcacacacactcacactcacactcacactcacactcacacacacactcacactcacactcacacacacactcacccaaacctgtctcccccacagacgcgctcagcctggcgctgcagctgcagctgcccgccgccgacctgctgcacgtgctactgccgctgccgccgccacccggccctgctgctacagccgccgcctgtgctacagccgccgcctggaccccagcagccctggagcaggcgcagtcgggcgccgcggacggggccgtgttttacgacaacttcagggccgtggtgaaccgtgccctgctgttcgaagcagacacggccgtacggcacgtgatgaccgccctggcggccagcgcgcagctgctacagccgggcagcgctacagccgccgcgccagaggcagtagcggcggcggcggcggcggcgctgcgtgctacagccgaggcggtgctgggcggcgtgatggagagcctcatgcgctcccgcgccgccgccgatgccgccgctgctactgccgcggccgctgctgccactgccgcggctgcagcctctgccggtgccgcaggcgccgccgcctcgcagggagcggcgggcgccacgcaagccgcgcgcgccacccaagccacgccagccgccacgccagccgccacgggcgcgcccgctgcgcccccgctgcggccgcccccgccctccttgccccgcgccgtggacctgcacctgtccgccttcaccgccgccctgcgccgccacctgcccctggcggcgccgctggcggctcgcggctcgccgcccgagggccgcctgcttctgctgcggctgctgcggctggcgctgcggctggacgcgccggggctgctacagccgctgctacagccggcagcggcgcatggcgcgggtgctgctacagccgcggcgccgtcctcgtcctgcctggccttcatcctggactgctactgctccatgctgtcaccgcagcaggacgccaggtgacaacgctgaggcggggcagtgtagctgctagctgctgtgtcgatctgtgcaggctctgctttatggccgttcgcaaataggccactcatgtcctcctgcgtctcctgccgctcttgccgctccttgccgcccatgtccctcacccgtttcattgggcccgggcacataaagcccttctgtaatgaatcacgcaatgcatccccccccccccgccctcagcgtcacctggacaccggcgctgcagctactgccgctgctggccgcacagctgccgccccagcacgcagtgctgggccgcctgttcacactcggcagtagcacgggcgccgacggcagtagcagcagcagcagcagcagcagtggcgttaacgctgccaccaccggcgccgtcagtgcgctggtggcggcggtcatcccgcccgacagccgccgggagctgggggacgccgccgccgccgccgccgcctcgcccgccggcgccgccctgtcacagcggctacacgctctaatgctgacgctggaaggactggcggcggccgccgccaccgaagccgcagtagcagctgctgctaccgccgccggtgctgctactgccggtgctgctgctactgccggttcagcggccgcagaggcgggcgcgggcgcggacgggtctgggtctgggtctggggcgggtgtgcgggcggctgcggcggaggcgctcctccgtgacctgctggtggtggttcaggacatgggcggcggcggtggcggtcacgtgctgcagagccgcctggccgccatgttcacacgcgtggccgcagcggcctggctgggcttccccgccgttggtgctgctggcggtggcggtggtggtggcggtggcggtggtgctggtggtggtggcgatgaggagtcggggagccaggaggaggcggcacaggcggagatggaggcggaggcggagcgcgcgcgggcgtggccgggtgcgaggctggtggcggcgtgctggcggtgggctggcggcggcggcggcggcgtagacggtagcggcggcggtggcggcggcggcgcgttgaagcgggagctgcggctggcgctgctacagcacgtgctattgccgctgctggcggcggcgccgaccgggttccgcgtctggtggtacggcagcaacgtacggcggtttgtgcagtacgtccagaaaaccgccgccgccaaggccgacccagtggcggcggcggcggcggcggcggcggcgccggaggtgctggcgggcgcgctggcggcgcggtgtgcggctctggtggactcgtgggtgtcgtacggactgctgcggagtatgtacggcacgtgcagcgcggcggaggtggagcgcgtgtggggcaaggtgggtgggtgggtggggctggatgtgggtgggtgtggatgtgaggctgggagggtgtgaggctgggagtgtgtgtgggggggggggctcatcaattgggcgatgcatcacccgcacactcacattcacattcaaacgtgtgccaacaggccaatgagcatctggcgccggccagtggcggcggcggcggcggcggtgcgttgaagaacggcgtggtcatgtcggcggcgtgtgcggaggtgtgccgcccgccgccgcccgccgccaccaacgcggcggggctggagctccgggtgagaaggcgcgcgtgtggaaggccacgagcctttgtctgtggcgtcggcattagggcgagttgggtcggggctgctttccatttcgtggggtgcgtgctgctcgcccccagccaagcacaatgcagcccaacctactacacgtgacactcaaccgcgtcggcgccgcccgatgcacgcaccccacttgcccgcccaaaggatttggaccgggacgtgcgctgcgcggcctgggccgccgccgccgcgctgctgctgcgcacccagtcgcgcgcggccttcttcgccaaactgcttagaccgggtgcgtggtcgggtgggaggtcgggtgggaggtgcgtgggaggctgggtgggtgggtgggtggtcccccaggtgaggggacgaacggtttggcggtgcagtgtgttcttatgtggtgagtaggtgtagttattatgcagtaggctgtacgtcgggacggctggatggaagttcccttggcgccccatggttgcactccttgctgctgcccatcccctcgtgcgctgcacaacctgaaggttccccaccttcacacccagtacacgtgcgctcctcacaacacacacgtgcacgcacacgcacacgcagacgcgggcggtggcgctgcggctgtgtggggcgcgctgctgcggcaggaccccgccttcatgctgcccaccgtgctggacgagggcgcagccggcggagcaggggtgagggggcggggtggtggtgggggctgagtgtgtgcgtgtgcgtgtgtgtgtgtgtgtgtgtgtgtgtgtgtgtgtgtgtgtgtgtgtgtgtgtgtgtgtgtgtgtgtgtgtgtgtgtgtgcgtgtgtgcaagggcagatgcaggtgcagttgtgcagttgcgggggtgggattgtgcattgcaatgatggagcgcggctgcgtcaacacggttccccgggcccacacacgcagccggccacatgcccttgtgcccttatgctctcatctggccattatgcccgccttccctcccgcccttcttgccctgcttgccctgctccatcccccgccaggccgcgggcgcagagaggcgcaagcggctgcgcaaggagcaggaggcggtgcgggtgggtgtgcctgcccgccctccctgcatgccaaacccgtccaacccgatgcaaccgtatggacagtgacatatttacaatatccaacgccttggctcattttcatttccttttccaactaattttttcattttcatttccttttccaactcttttcattccgattccatccaacccattccaccaaaacttgcgcatcatccgtgatcgcaccttgacttgatctgacttggcttgacttgacttggcctgacttgacttaatttggcttggcttggcttggctgggtcccgcccgcaggagatgtttcggtcgctgcgccgccaacgtgacgccaacgcggcctggcacgcggcggcgacgctggcggcggcggcgggcgggactggcggcggcggcggcgcctccgccagctttatcatgggcaccctcggcggcggcggcgccagcctctactacactggcggcggcggcggcggcgacgtcgccagcctgacggccaaggtgtcggcgtcgcagtttgatctgggtctggcgtcgacgtcggccagcctggctggttcggctggctttgccggcggcggcggtggcggcggcgccgccgccgccacgccgccgccggcttcctttgcggcgtcgggcgcggcagggccgggcggcaaggccggggcggtggcggcagtgccctacacatggagtctcagcggcggcggcggcggcggtgctggtggtggcgatgacggacggccgctacccgccgccgccgctgcagccgttgacccggcggttgggctggcagcggttgaggatgaaaacttcctaaccgactccctgacctttttggacgacgagatggacgagcacgtgtgcatgctgccgctcgtccagctgatagagaagtacagcgacccgggcagttgggacgccgcgaaggaggcggcggcggcggcggccgcacgtgccgcgctgttccccgccgccagcgccggcggtggcagtagcaccagcggtggcagtagcacaggtggcgacgcgcccatgccttcttggctgcagacgctgtttgaggcgctcaatagcgaccacacgcccaggtgcgtgcacgaccgccgccgccagcaccggcacagctgggtaccgctgcaccccacacggggggctctgcgtgtttccctccctccgcgttccgcgacacgcacgcacgcacgcaaatgcacaaacacgcacgcacacgcacggtgttttggccgactcaacaaatcggaacacaactcaagccacaacacaaaacacaagactcctcacctcgcccacgccacgcaggtacacgcggctgttcctgctcaaggccgtgctgcatgtggagtaccgccaccagcaggcgcgcatcgcgggcacacgccgccgctaccaggcgcaggctgtagcggctgtagcagcaggcgcgggccggggcagtagcagccagcgggcctcgcaggcggtagcagcagcaagtggtggcggtgtgggcagcatgcgtctgagcagcctgcaggctactgccgccgctactccctcggcgagcctgggtgttggcaccacacaggctacacccggcggcggcagcgccgcagcagcaccgcagcagcagccgccacagccgccacagcagccgctacagcctgcgggtgcggacgtgggcccgggccaggcgcggctggtgtggggcgccgggggctggggctgtgtggaggcgggggaagacgacgacctgttgtttgggagcgacccgctggggacggctgctactgccggccggggcggcggggccnnnnnnnnnnnnnnnnnnnnnnnnnnnnnnnnnnnnnnnnnnnnnnnnnnnnnnnnnnnnnnnnnnnnnnnnnnnnnnnnnnnnnnnnnnnnnnnnnnnnnnnnnnnnnnnnnnnnnnnnnnnnnnnnnnnnnnnnnnnnnnnnnnnnnnnnnnnnnnnnnnnnnnnnnnnnnnnnnnnnnnnnnnnnnnnnnnnnnnnnnnnnnnnnnnnnnnnnnnnnnnnnnnnnnnnnnnnnnnnnnnnnnnnnnnnnnnnnnnnnnnnnnnnnnnnnnnnnnnnnnnnnncggcctgtgccctctgctcattgggcccgggcacagaaccctgcctacctgcctgcctgcctgcctgcctgcctgcctgcctgcgtgcctgcctgcctgcctgcctgcctgcctgcctgcctgcctgcctgcctgcctgcctgcctgcccgcccgcctcccgaatcctctcccccttcccaccctgcctgcctgcctgccctgcagttctcgaccaccgtgtttgctgtgtgggccgagcacttcttccccgcacttgtggcggcggaggcgctcggggccggaggcggcaatgcagccgccgccgccgccaccgccggcagcccggatggcggcgacgcggcaggcccggtggccggcggcggcgaccgacacaaggcggctgcacggggcggtggggcggcggaaggcggcgagagaagcggcgaggaggatgatgaagatggggaagaggaggattttgagccgcagctggcgcagcgccggcctgagggcgaggccacgctcacacagctgcggcgccggcaccagcagtacggagcagccggcggtgcaggcatgggtgcagcaggtggggccgcggcgcagaggctgccaggcatgggcgctgtagctgcaggcgctgctacagccgccgcagcgccaggcggcggcggcggtggcagtggcagtagcagtagcagcagttgcgggccgggcacgcttagtatcgtgacgcggctgctgatccagaccattatgagttggaggaagctggcgccggccggcagtagcagcagcaacagcggcggcagcagtgttgacacgccggcggcgggtgctacagccaccgccacggaagacgctggcggcggtggcggcggcggcggcggcctgccgcgtgggccgctgcgcgaggcggcggagcggctgctgcggcgctgtgtgtgtggctgcctgcaccccaccagcgcagaccagagccgccacaacgccaaccacgtcatcacgctgatgtacttctggcgccgagccggcgtgtcgctgctgggtgcggctggcggcgggaggagaggggagagggggcagagggcgaggcggcggggtggggggatggctggatggctgggggtggttggcttgcgcgcgtgtgcgtgcgcgggtgtggtttcgcttttgcattgcggtcgcgcgcacgcctaatgcgatttgcagtcgaccgattggagactgccacacccaccactcctgccgctcctgtcgctcctgtccggctgtgcaggtcgcgagctggtgccgctgctgggccggcggctgccccagcggcagcgctgccagggcctgagggtggcgcgggcggcgctgggctacggccaggaggaggcggtgatggcgggcgaggcgtgagtgtggggggggggggggggccttgagggggggggccaagccctggtgctggggtggttgtggcctttcctggcctggtgggggtggggcccgtcggcctcaggccctgttctacctcctcctactcgggatcttggcatatccgactcctggggggggggggccccttacgtgtgtcaggccctggggcgggctgcgggctgcaatggccacttccccaccttgatggggccttcccgggcggggtccagtgccggcccctgccggccccgcgctgcagcacccatcccgcttgacgccttgcgcccacggttgtcctcagccgccgccttctttacggcctcccgtctaataactaccccacctgcatatcgccaaccgcctccgccgccaaccgccaacccccatcccatgcgcctattgttctcccaccacccccacccccccacccccaccccacacacatagggctgcggacatctggaaggcgctggttggcatcaccgcctgccgcccgccgccgccgccgccacacaccaccagggcctcaggagccggcggcggcggcggcggcgggcacgcccaccaccactacaccggcggcgccgccggcgcccctcagctgtctgtggaggcggcgccgctggggcagctgttgggcctctactttgccaaactggcggagcgggaggcggcggcggcggcggcggcggcggcggcgggggacgctggtggcggggcaggggcggcggcgacgcccggcgcctggggctgggcgggcgctgccgcggcggcggaggcggaggaggaggatgagggggacgtgggcggcgggggcggaggcggactgggcctgacggctagggcgaccaagcgagcgcggctgtcaggaggtgagaggccatgtgctgcgtgtgctgcgtgtgctgcgtgtgggaggaggccagggcaacccacggccgccacggtctgtgcagattgctagggcacgacgaatgttggtcgctgacgccgtgtgtgttgtgtgtgttgacgccacggcggcgccgcacaggctcctcgctcaaggacaagatgcaggacatccgggtgggtggaagtgggtggaagtgggtgggtagatgggtggggggtgggtgggggtgggtgggtgggtgggtgagggggccgtcagtgcacaacagctgacggcgttgcaagacgcgaggacttcctctcatctcccgccgtcccccatcgtgctgctgcgcctgtttccaagcacacacatcccatgccatgtggactactatttcaacacacaccacacaccgcacgccgcacgccaacccccaaaccctcccccctcacctcccacccctacaacagtcggccctgcgtgaggccaccgacggcggccgcaactgggaggcggcggtggaggtgcttctggggctgtcgcagccgccgccgctagggcacccgcccgcagccgggcccctggcgccagagctggtgagtcgggggagggggggggtggggcgggtgggggtttggcggggcgggaagatagggctggggcggaggggcgggggctgtgggttacgttgaggggccgcctgaggccgcccaattacgcacgcgcacacatgtgcacacacaagcccttacaagcacgtggaggtgttgggggcgctggagaatcacacacgcaatgcgcatacatgcgctcacacaggcctctcctacttagtgctgttacaccaccacacacacacacacatgcacacacacacacacacacacacacacacacacacacacacacacacacacacacacacacacacacacacacacacaggtcaagcggctgggcgtgttgcgcgacgtgcgcatggccgatgcgctcctggtgctcaggtgattgtgtgattgtgtgtaggcgcgcgtgtgtgtgtgtgtctgtgtctgtacgtgtgtgtgttaaaaaacgaaacgaaagcccgcccaatgacgcgacggagttacttaccgatacccaccattttaccgagcgtcgcgtgattgtcgtgacccaggtagtcatacttacccgcgataagcctggaacccgtgtgtgtgtgtgtgtgtgtgtgtgtgtgtgtgtgtgtgtgtgtgtgtacgtgtacgtgtacgtgtgtgtgtacgtgtgtgtgcgtgtgtacgtgtgtgcgggcgtgtttccctgaaagctgggaacccaacaacaccgcacatgccgccaccaacccccttccccgcatccggctcccacaaatgcacacaggcgctgcgcgctggtggcgtcgcccgccgccgcccgcggcctcttcatcgacctgctggcctcactggacaggtgggcgtgtgtgggtgtggcgcattgtagtgcagtttggtgtgggtcaacaaccgcgcgcttggcactgcggcgtgcgtgtgtgtgtgtgtgtgtgtgtgtgtgtgtgtgtgtgtttgtcagccttggccgacgtgtcgtacctcgccctcgtccgtacgcatccctttcacggccggccactgctgactgcccccccccacacatacacacacacacacacacacatacggtacacgtacacaggctgccgctgcgctccatgcgagtggaggcgcaggtggcggctctggagctggtgcaggtggggtgggtggggagggctggggatggggggatggggcgtgggcgtgcgtgtggggggggtgcacgacaacacacatgcgccgctacagccctcactgcacctgcacctgtccctgcactgccaaccccaaccccaacctcaaccccaaccccacctccgcacaggccctggctccccgcgctccgcccgagcagcttcagcggctgctggcgctgctgttgcgccgcggcctggccgccgcccccgaccccgccgcccgcctggccctactgcgcctgtgcgccgcgctgtgggcgcagcgggggctggcctggccatcgccgcccaggcagcagcagcagcagcagcagcagcagcagcagcagcagcagcagcaacaggaggcaggcgcagctgctgctactgccgatgcggcggaggcggcgcggctgctacagccgctgctgctgccgctgctggcaggggcgctgggcgacggggacccgggcattcgggcggcggcccgggggttctggcaccggctgctgccgcccgcgccggcggagcgactggcggtgagaggcgacggtcgtgggagcggagcgcgcgggccggggtaccgatggtgttagtggtgatagtggtagtggtggtggtgggttgtgcagactgtgtgcctgagtgccccagtgctgtgttgccatgtgctgccagtattcctgcgcttcttcccaggttgacgcccatatgtgccgtacgtctaccccccacaggcgctgatccgtcttgcctcggagccggccctcacgcccaccacctccaccaccgcctcccccaccgccacagccctagccgccgacgccgccgggcggctgcagcgcggctggcccggtctggcggcggggctgctgctggcgccctccctggagccgggcagcgccgccgccgccgccaacgccgcggctctgttcaccagccagccctatgagtgcgagttcagggactacacacccagcctattcgcgggcggcggcggcggcggcttcggcggcggcggcggtgcaggaggcggcgggtcgctgtctctgcgcacgcccgcgttcatgatgtcacaggtgcgcgacggctgggattctttccaagccactggctggtgtggtgcatggttgctgcctggactcatacctgcgtgcagtacatgcgtgaatgcacttgatgtacaatcgacacagcacggtttagaatttgaacgcacacgaacgctgttgcaggacgcctcgcaaggcggcggctacttccgtggccggcagcgcccgccccgcggcctgctgcgcgccaccgcctccgtgtccttcaaccccacagtgtcgttgtcgctcaccggggccggcggcggccccttcgcagcacccctgggcggcggcggcggcggcggcggcggcgccagccaggcctcgggcggcggcgcggcgttccttgggccgtcactggcggcggcggcacagggcggcggcggctcgcagcagggccttgccggcgcgagccaacagcacggctacagcctgggtgctgacggcagcagcggcggcggcacgagcggcggcgacgtcgtgcgtttggtggctcgcagccgcgcctacgtcggcgggggcaacggcggcgccggcgacaccaagcccggcggcggcggcgccaacttcgcggcgcggctgcggggcatgcgcgcgcaccaggcgcggcagctgcgcatggggtcgctgcggcgtcacggccgcgcggcgcgtgtgtcgctgttgcgcagctaccgcaccggcgagctgcccgacacgctgtcgctaaggctgggcgagtccttcctgcggccgctggcggcgctggtggaggccgacgccaccgccgccacggcggcgctggcggcgctgacggcggccgtgctggaggagggcaacaccgccgccgggtcggaggcggcggcggaggcggcggcggacgtgcccgccgctggcgcggcggagccggctggatcaagcggcgcggcggcagctgcgggcggcgatgacggtagcctggtgatcctgcggcagcagcagccgcagcacgccagctccgcagagcagcgccgcgccgctgccgagcgcgagcgggccgagcggcggcgggcggcgcagcagcgggggctgcacgccgcgctggcggccggcttcggctgccggcccacggcgccggccttcgtagcggcactgcaggcagtagcagcgcgcttcgccgaggccgcgctacagccggcatcactcaacggaaccttcccgccgccggggcagcctgctactgccgggggcgcagacgctgcagcggactcggaagcagcggcggcgggggccgtagcagcgccgccgccgccgctgctgttgctacagccggccgacgtgctggcggcggcgggcgcctgcggcggccagcaggcggctgctctgcttctggagacgcagcaggcggcgctggaggagcgcggccgccgcctgcaagagcagcagcagcagcagcagaagaagcagcagcagcaggctgcagccgcgggcggccgcagcggcggcagtagcagcagccgcgccgccagggccgccgccaatgccgtgcaggctgtacagatcgggctgcatgacacactggaggcgctggctgtggcgtacggcgatctgggcgagtccgacgtggcggcggcggcgcgggcggggctgctgctgtgtcccgtgacggcggcggcgctggcggcggaggcggcggggcggccgcggctggcggtgcggcggctggggcaggcgcaggcggcggcggagatggtgcaggtgcgtgcgtgcaaggcgcagtcgcgtgatgtcaatgcgcgggggtcgctgcggcggacaagtcttcttacttcgactgctgttgcgctcactccaggtgtagggacgtcatgtgcaaaggcggttgcatcattgccgtgccgttttcctgaccctcatctcacataacaccatccaacgccccccgcatcgtaggagctgggccctgtcgcggcggcggggctgcccgtgcccgagcggccgcaggacttggcgccggccggcgccgtgactgctgcttcggcagatgccgccgccgccgccgccgccgcgggtggcactgtcggcgaggttactgtggcggacctccttggctctcaggccctggcggctgcagccaccactgcagcagcagcagcagcagcagcagtagctggcgctggcaatggcagtggcggtggcggcaaagatgtgggcggcacaagtggcggcggccgcacaggtggtggcggcggtcaggggttggcggcggcgccgccggccgagtcacggctgtggcggcaggtggtggtgcgatgcgcggacgcgctgggcgactggcagcgcgtggaggtgggatggaggtggggtggcggtgggagtggcggggtgagtgacatgggggcagggtcgtggaggggacatgggggcggggacatggggccagggggggcaggtaggacgctaggcggtggtccttatctggacggaccgtcacacggcccgtggacgatctttcccacctgtcctgatccggcaacccaacactgtgtttgcttccatgcgatgcgcacgccgccggggccgcagacggagctggaggcgcccgtgcaggagctgcttggggcagcgggggccgccggggccgctgccgggggcgtcggcgccgcttcctcatccacctcgggggcaggcctgttcacgggagctgacgcggcgccgccggacctgctggcagcagccctggtgcgcggcctggcccgcggcagtagcagcagcgcaggcggcggcgttaacggcaacggcagtagcggcggcgccgccggctcggcggagctgctgcggcgtgcgctgcgtgcggcgctgttccagcttcgtgagtccgacgtagcgccgtcgggccatgggctgggcgccatcatcggcggcggcggcggcggcggcggcggggatgtcatgatggcagatgctgctacagccagtgacggcggttcgcatgccgccatcgcggcctggattgaggcgctgttggagcggctggatggctcgcaggcggcggcggcggcagcagcggaggcggcggcgccgctggagctggtggcggcggcggtggtgcgtgcgtgccgccagggcagctgggagcgatgtctgggggaggtgcaggtgagcgtcattgccaggcctgtggtcatgcgcttgtgtgttggcgtgcgctccggcagtctcgcctgtcattaccctcgcatgactctcgccttgcgccgcgccccttcctgccctccggcgtgcactcccgcgcgctgactggcggcttgtgccgtgccacggtgatctgctcccccctcctctcctctccttcccaaccgttgcctgctctccttcatctgcccgcagtcggctctggcccggctgcgctcgcgctgggccggcctgcacccgttgtcagccgccgcccgcgtcgccgcgctgtcgctgctacagccactggcggagatcagcgaggccgtgcggcaggtgctacagccgaccgcggcggctgcggcggctgcctacggcttacccgctggttcgttgcggctaagtggcggcggcggcggcggcagtagcagggcagcagcggctgtagcacctgggcatgcgcgcggggcggcggggccgctggcggagctgaggggcttggtggcgcgctggcggcggcgtggcctggggctggcggtggcggcggacggcggcggcggcggcgcgggcgccactgcggccggcagcgacctcatgtccgtgctgcacgtacgtgaacgtgcacgtgcgcatatattagtagtggaagggggaggagaaaggatggctgagaggcaagtggttgggatattgtggcttgctggcgcggcacggccgcgtgtcctcagctttgcgtcatgttgctgtgcaactgcagcagcagcagcagcagcactaaccctgtgtgctactgccaatctctgtcctgtaggtgcgccgtttgctgctgctggccgctggcacccgccgccccgcgaccgcgacgccgtccggcgcggcgacagagcctgctgcagccgccgccgcccgggcactgcaggccgccgcccgcgccgccgccgccgccaccgtgtttgacgccgcggcggctgcgctgaggtccgggtgtgtggacacggcggccgaggccttgcccgacttcgccgtgggtgacgaggaggtggtcgaggtggtggagggagctacggccgcggcagagggcgcggacggggcagcggcggaacggcgggcgcgacagcgggcgcgggcgcggctgcggctgtttacggcgcacaccgacgcggctgtggcgcaggcggcggcggcggaggctgccggcagcggcggctggatcggcagtagcagcagcggcagtagcagcgatgttggcggcactggcggcctgtcgggttatgattggcgtgtgtatgagggactgaatgggctgctggcggcgctgaggccgtggctcaagggcgcgacggtggcggcgacggcggtgccggtgctgggtccggggcaggtggcggcagcggagctggcacagtcgcgggcgctgctggcgtgggcgggtgggtgctgcttcatgggtgtagtggttgtggttggtgtaggctgttgtctcatgtgggttcttgcctcgtcccaccgcccccgagccttgcccagccgagtccgattctgcgcactgacccgaatgccccctccccgccgcccttcccgggccgcccccgcccccgcagccaaccccgccgagccgcagtacctgaccgcccgtgtgggcgctgccctgttgagcggcgccacagcggccgcagccgccggcgccaacctgcagtcacagctgcagcggcggcggcagcagcagcagccgtccagcccagccccgcattcgcagcagccgctgcagttggtgctacagccgcacgctggcccccgcgagacggcagcggcgttgctggcggcgcgcgcctccgcccacttcgccttcatgtgcggccgcctgttgcgagcccacgacgccaccaccgccgccactgctactgccgctgcagctgacaatgctacagccgccaccggcagcggcagtagcaccggtgaccccggcatgccgccgctgaccgcgctgccggccaaggtgctggaccgcgcgctgcgtgccggcggcagtagcactggcaccagaggtgctgctgctactgccactgcggctgctgctgctactgccgcggcggctggcgagctggccggctgcctagtgaggcacctgctccgggcgatggccctggccggcagcgccccggtgacggcgggcggctgggtcctggggggtgaggggggcgagggcgaggctgtagcagccggcaggcacggcagtagcagcagccagcatgacggcgatggcggcggcgatggcgatggcgagggtggtggtgatggtgacgatgggtgcggcgggggcggtgtgccggaggtgcggctgcacgtgccggtggtgctgagtgtgctgcgagacggctggggcggcagtagcagcggcagcagcggcggcggcggcagtagcatctgcggtggtgtcgacacgacggcggcggcagcagccgcattccgtgagggctggtcggacgtgccgctgggctgcttcctgccgtgggcggggcagatgtgctccatgctggcggatctggattcagcgagtgcgggccggtcatctggatccggctccgacccgagtgcttcagatccagatccggatccagttttaggcccgctgactgcgctgtcgtacgcctaccctcagctgctgcacgcgccgctgcgcatgagcgcggcgggctttgcttcggccggcagcggcagtagcagtagcaatagcagtagcggcagtagcagcggcggcagggctgcggcagctgtagccccgctgctggctgccacggccagcccggtgctggagggcttcatcgacgccctggacgcagccacctacccggcacagaggtgggcgttgtggctgctgtgttgtgtcttgtgtgttatgcgatttgcggagatgggggggagatccctccgtccaggtccatctccaggacacgcaacagccgtgtggtagtggcggtgtcatggtgacgaagcctacgttaggacaggctgtatccgtaatagaaacacaccccacggagagggctcaacatgcaggggttggcgggtccgcatactcggcaggggctggctgccgttccacgtgggtttcgcaggtgctagctgggacagtagaacagtatccaacacactatccaacaggacccgaatcctcttgaggggcacagcgctgccgtgtagtagtggcggtgcatgcgcgtgcgagcggcgcattggcgaacggcacggtgtcagctgcgccggccgcctgtgcactcgcacttgtcctccaaacaaactcacaggcggcacggcacacacacagtcctatgcgtgtttgcttccctgaccgcctgctgtgtctccctctccaacatcacaggtggcaggtgtttgtgtcgcgcatccgcggcgccctgcagcgcggcgggctggacgcagccgtgcgcgtgtggacacacgaggcctggcccaacctcttcggccgcttcctgccacacggcgcagccgccgccgccacagccgccgccgctggcgcaccgcaccgcgcgcagcgcgccacccgccgcgtggcggcggacggcggcgccgccgccggcggcgccgccggcgccatggcggctggcgacaccgtcaatgcggccttcgccgcccgctaccgcgccgcgtttgaggctcagttgggcggcgccgacggcggcgagctggcggcgctggcggcggcgatgcggcgggagcacgcggcggcgcggcgggcggcggcggaggggcggctgagcccggaaggagcggcggcggcgggcggcggggcgcggacgcgggaggctcggctggcgggcatgtcggagcagcaggcggtgtgtgcggccttcgacggcgcggtgcggaagatcatgaccacatgcatgcagcgcgggggcggcggcggaggaggaggtgggggaggaagcagctcgtgggaggcgctgcaggcggcggggccgcagccgctgtcctggttcagcccctggttcggagcctaccagcgcgcggcggaggacgcggcgacccaggcggcggcggcggcagtgacacccggcggcggtggcggcaacaggtggggtctgcgcggtgtgaagtggcgggtgggtgcgtgactgcgtgtgcgtgtcccttgtctatccgccatgttgtgactccgcttccgaggtgttatgtacgcatgacactgacacgggtggagtctgtaccaatcaatatcgctgctcctcctcgtcctcctgctcctcctgctcctcctcctcctgctcccacccctcccctccaggctgctccaccgcacgcagctgctgctgcccaccatggccttccccaccgccgccgcgccgccgccaccgcacggcacgccgccaccgccaccgcatgcacgcacccaccgcccctcccaccacccccaccaccacccgccccttcctgcgctgggctgtgaggacgtggcgccggtgctggtcactggcttcggccgcgacgtcaacgtgttcggcagcaagcagcggcccaagcaaatgacaatgttctgcaggtggggcgtgtgtgggcgtgcgtgtgtgtgggcgcgtgtgtggggggcatgcgtgtgcgtgtgcgggtttgcggacggaggagccggcctgggccctatcgtccgcgctcccgcttgcctctcacaacccgaacggcaaccgccttgcctctcccactgcctctccctgtgcctcttcccctgcctccccgcccatctcccccctttcgctgggcttgggctcatgaccgcccctccccctccccgattgcctaccgtcttccatttccttagcttgtcatgaatgtaaccccgcccctcgcgcccccccccctcgcccctcgcacccctgcagcgacctgagccgccgcacctggctgtccaagggcggcgaggacgtgcgactggacgagcggctgcagcgcctgttcgacgtcatgaacggactgcagcgccagcagccgggtggggagggagcgggagggagggactgggaggggctgggggacggcgggagagagggagaggtgggggaggagctgcgatggaaggggaggggcgggcaggaggagcgcgaggaagagggaagaatgagcggatggggcggggggaggtagggtatggcgggtcacaaataccgtgaagtgggtcataggcgcggtccctcacgcgatgcacgacgttgcaatgcagcgagagccctcatctcccgcccaccccacacctcactgagctgctccccctccctgtgcctccccacccctccctgctccccgcccagcctgctaccggcggggcctgcgtgtgtcggtgtttgcggtggtgcctctgagcgcgagtgtgggtttgctggagttcgtgcccggcactcgcccgctgcaggtgcggtggcccactagccatgcgacagatgcgacctgagggcagggcaggagtcctatggggggcaatgggcgtggcggggcggggcggggcggggtccaccttggctaagcctgttagctggtcgacctgtgacctgccaaccaaccgcaaccacaaccgcccacccaaccactcatgtacgacacacacagagcgtgctgctgggcgggccgggcgcgccgcgggacccggacgccggcgcgcgtgtggctctggcgtgtttcgtgtgtccgcccgccggcgtcccccccgaggttggcggctggacccgcggctacgaggccatgtacggagccatggggccggggcagcgcgcggagccggcggcggcgcgggaggcgtttagaaaggtgcgcccatgccgcacctcctcgctgacctccgccgtcaatttcagctggggagcacgcctctctgtcggttggtccactcccccatgtcccccgcacacacacaggccgccggcgctctgcctccctgcctcctgcgctccgcgctgcttcgctcctgcggcggcggtcccgagctgttcctggcccggcggcggcgcctggcctccagcctggctgcgggcgccgccgccggctacctggcgggtgtgggcgaccgccacgccgacaacgtgctgctgcaggccgccaccggggagctggtgcacatcgacttcgggtacagcttcggcgcgggcacgcaggtggtgcccatccccgagctggtgcccttccgcctcacgccgcagctgcaggccgcgctggcgccggccgccgccgccgccgtgctggagccggcgctggcggcggcgctggcggcactcagcgggcccagcgcgcggcagctgctgggggcggtcatggaggtggggatgtgcgtgtattgtgtgtgtgtgtgtgtgtgttcagttgtgtgtgtgttcagttgtgcgcgttgaagtccgctggcttcaaactgcattattgggtatctaacaggacgagggaaacgctccgtgggtgcggtactccgtaggtagtcgccactgccctgactcgtgtgctgcatttgcctcctgctgcattcaaagccctgcccacatccccaccccctggcatcgcatgctccaggtgttcctgcgtgagccagtggcggagtggcagcacgaggcggcgatcctgcgcagtctgcaggagtcagcggcggcggcgcaggcggcggcggcggcgcggcagcggcgcaaggggcaggagcggcaggagggcgcggaagcggaggtggaggacagcagcagtggcagtagcagtggcagtagcggaggtctggtgctcacggacgatgcgggaaccaacagcagcgaagcgccggcggcggagctggcccgggcaagggtgagtaccgtagtgctgagtctagaggaaacgcgcccaccccacacgtctggggtgcattacttcctcggtagttctcggggtatatgagtgctgatcgctcctcaacactttcaagttccaactttctctcgccttgtccttgttttcgtcccacacactgacacgcacatgcacccgcactcgcgcgcaggtgtccacggcgctccagaagctggcccggcgccacccctcgctcatcaccgcggacgagctgcggcccgtgcacggcgcccggccctactacgcagccctgtgcgccgcggtggcggggggggcggcggcggaccaggcaggcggcggcgggggcggcagcgtgcgcgcgcggctgctgcagcaggtgcgcgtgtgtgcgcccggggcctggggcctgggcacaggggactggggcctggggtccgctcggccacgccgcctgtgagtcagtaacgcttccccctttcaccccaaaaaagacacacagctccgcaccgttgccttaccgctcacgcacctgccccaccgccgcacgcaaccccctgcacacacccgtgaacaggggcccctgctgggtgcgggtggcgcggggggtccgctgctgctgagcccgctgctgcaggcgcgctgcctgctggaggcggccaccgaccccaacctgctggcgcggacctacctggggtggaagccctacctgtag

SEQ ID NO: 6 - DNA, 4481 bp, Chlamydomonas reinhardtii
atgcgagctcttggctctggcgtaccgcgggtggctcgggccggtgtggccaggggcccggcaccgctgaattccttttggcgttcttacggctggggcgctgaaaagacgaaggaatctcagtttacttttgacgtgagtgtgtaaataattcgactacgaaaggaacgacagtcggtctgcaggccgcacgtcccacagctcaggtcactgcccacgtcgcttgtgcccgtccttgccacccaagtctcccgtgctccaacccgcaaacccgccttcctttccaggaccaccaagcgatcttcgagggccgcaccacgccggacctgctcaagtcgctgctcgtgctgcggctgtgctccacgccctccttcgtggcctcggcggagggcctgctcgccaatgcccggcgtgtgatgggcgacagcaccgccctcagcttcgtgcgcaccaccttttaccagcatttcgtggccggcaaggactcgggcgacgtatggggccgcatgaacacgctgcgtgcgaacggcgtgggcgctatcctggtgagaggatggcaagcgggcacgcaagtggggtggtgccaccagcccgatcagggctggaaccactggagggagcggaccaaagcggtggaggctgcgagatggctgggttacaggggcgccagaggcctgcagtatgcggagctggcgcgaagctgggcgatcgcccttccaactttggtgctgttctccaccgattgcgcccgacacaggactatgccgaagaggaggacctgctcaccgcctgcaagcagcccgcgccgcccgccaccaaggcgtcggctggcgcggctgcgggcggcgcggcgcaggtgtctgcccgcgaccccctgggcggcgagtcgctgattgagtcgggtgtggcagcgaggacgtacacgttccaggtgcgtgcgggcatgcagtccactgcaagtgtgtgctatgcatatggcatctctcacggaaggtcatcaggaaggcgggacgggagctgtgcgcggggctacgtgcgccgtggctaagcccaagagctctgcatcacacacaagaaccccgctgacctgccgtcctcccgccccgatgcatgcaaacacgcaggacgacgccacgtgcgagttgcgcacacaggccttcctggcggccattgacaccgccgccacactgcccggccagggcttcgcggccatcaagctcacagccctgggggaccccgcgctgctggtgcgtgcgtgcctgcgtgctcctgtgtgctgctcctgcgtgcgctcatggcgcccgctcacgcgctgcacatgttttctgcgcccgacagcccatacggtatgcgtgtccttcaccgactcacgtaaccgccgcccaaggctggtgccgtgccatgctccctgccgtaccaccgtcactgaagtggttacggtgctgtgctgccgtacgtctgcactgccgtacgtactgcaggagctcctggcctcggctctggacgcagtgaaggccctgtttcggcgctatgacagcaacggtgacggctttgtcacgcggcagggcttcctggaggccttcgagcgcatcgagaaggcgcagggtgagggcccgctcgcttgcgtgcgcccggctcgcagcacctccgctgtttgtgcggctcggatactagtgagctgatcagacgctgccggcattcctctcggctagccatagccttgcgctagctattctgtacccaaacgtacgtgtgtgtgtgtgtgtgtgtgtgtgtgtgtgtgtgtgtgtgtgtgtgtgtgtgtgtgtgtgtgcacaggccgcagcagcacaggggcggagcgcaacgagatgtgggcatggctggacccggccggcgacggccgcgtcgactacgtgacctgggccagccgcctggacctacgccgcctgcctgacatggccgccagccttaggcaggagctggagtcgcagaccggtgggtgacggcgcgagtgacgtgggtggcgggcagaagggaggagtggcgggaggtctgggcgcagggtggcgctccgcgtgcgtacgtgagtagggtaatgtgacccagaaccgcgccgcactgacacccttcgtatgattcctcaacttttcaacgtatctgctgtagacgcccgtggacggcagtgggagatgtcggctgaggagctgcggcagctcgaggcgctgtttgggcggctgcagcggctggtggcgcaggccgtcaagaaggtgggccggaggcaggggaacagggcggcactgggtttggtggaactgggttgggtgctcgatgccagtgcgggacgggctgcacagccacgagggtatgctcggtgtgctaggacaagcgccctgagcgctgagggtagccagacgtttgggaggcgggcggaggacgcaaggtgtggcgccgtgacgcatcaaaaccagccaaagccgaaacggcagtaccgtgtgcttctgcacaaacagggcgtcaagctgatgattgacgcggagcagagccacctgcgccccgccatcgaccacatcggccgcgagctgatgcgcgagcacaacaagcccgtcagtgcgggcggcgagggcgccgtcatcttcatgagctaccaatcctacctgcgcgacgtggagctgcgcctgcagcgagacctggagcgggcggagcggcagggatacgtgctgggggccaagctggtgcgtgatgaagcgcgtgatgtcggcggtagtgctggtggtagagacatgtgcgcctgtgcacgtggcgatgaccggcgatgtctatgcccagctgctttcaccctgagggacccacctctcaccatacgtgcgctcatcatcaacgccacgccccctcgccatcatgccttgcacccactccttgcgcccactccttgcgcccactccttgcacccactccttgcgcccattcgtccttgcgcccactcctcattgcgccctgctgcctcccgcctcaggtgcggggcgcctacctgcacctggagcgccgccgcgcagcccaggccggcaccgcctcgcctgtgtgggaccacatgagggagaccaccgccgccttcgacggctgcctggacacgctgctgcgcggggtgcaggcggggcgggcggagctgatggtgggcacgcacaaccgcagcagcgtggagggcgtcatcgagcgcatgaacaagctgggcctggagccggaggaggcgcatgtgtacttcggccaggtcagtcacatgtcgggcatatggcgtgaggcataaggcctgtggagacgtggagtggggtttggttatggcgcggtctgcagcggagggcatctggccgtgtcatctaccttggggaactgcccgtctaacattgcacacactgcctcacgtacacatttcccgccccacgtttctatctccacactgcccaccactgcattacccttcctccatctccaccacccctcaccaccaccacccctcaccacccctcaccaccccctcaccaccaccaccaccaccgccttccacgcagctcctgggcatggccgacaacatcagcttcacgctgggacagcacggctacaagtgagtcgcctactgatgaggcagcaggatgggtcgtgggggcgggcatgagcagggaaggcctgatatcctgcccgcccgaggcaaatatgcgcatcaacccctgtcggtaacttcctcctagatacaggtcccgcgtggccaaccgtgagcttcacctagataacgctccctgtgaccattgttcatcgcccgtgcgtgcagggtgttcaagtactgcccctatggccaggtggacaaggtgcgtgcatgtgggcgtgatggacattaggaggcgcatgtgtgcgcgggcgtgtgggcgccatgtccagtcgtaattccaccacggccagtcccatcagcaccggagctagctcttacttatcctgcttgtggtcgcacgccttctgcacggctgtccatttatggcttgtgccgcttgctgccagtactgcctgcgggcgcgtgtctcccaactccctcgctcgcgcctaccgcccgggcactgggctccgcaggtgatcccctacctcatgcgtcgcattaacgaggcgcagtacacacgcaaggtgcgtaagggtgcgcgcgcgtgtgcggctagtgcggctttacatctgcgctcgaccgccgagtgtgggccacgcttgctagggggttgctcgcagtaattggcgtgtcgtcagcagccctcggaccacacgttcaacaccaccctatttaacccataacgtttccaatagtgtttcatcctgatcatgtaccgtactcgctcctcgcgttgcggccctcgtcgttgcagggcggcaaggaggacgcggcgctgcttctggaggagctgatgcggcggctgcgcgacccggcgcactcgcccatcgcgcgcatcttcagcaccgcctcctcctaa

SEQ ID NO: 7 - DNA, 5911 bp, Chlamydomonas reinhardtii
atggactatccaccgctgcaacaggcgcctggatttgacctggccacggatgacagcgggcgagaccccaacatccctggctccttcgccgcagtggtcgtcaagcggtctgccaacctgcaaggtaagtgtgcgtgcatgcaatcatgcatgcgcccaccaccacttggcagcgccgtacccacatcttacagcttgattgatcctcacacctgcgtgtctacgtgcgcgtggatggtgaggatcctgcacacgtgaggacagcatgcagcggcacacacgtacgggagctcacgcgtgtgctcccgtagacagcgcgttgcgcgcattgcatttataccgaatgctggtttgccgtacgctgctgctggtgcgtgtgcatgtctgctgcccatgttatgcagaggtctgcttgccgccggcctacgtgcccaatgcgaccctgggcacctggactcggcccacggagctgccggcagggaagcagatcacctactcgaccaacaccacgatcgtgttgctgcaccccaactgcactggtattggttttgacatgccgtacgaggagcagtgcatcaaatcttcgggaggcacgtttgtggatgtgggcgtgtactgctactcattggacccttttggaaaccaggttaaaaccggctacgtgtcgcacctgctggatagcgtgaaccgggtgggttatgctgtgacagttatcgcactttgctgcttgcttggttgcatctggcaaccaacactactcgttccatgcgcatagggacgaacatgtgtgtgtgtgtgtgtgtgtgtgtgtgtgtgtgtgtgtgtgtcgggggggtgggtgcgtggctcgggttttggctggcagtggatgcaggcgcagcattctgtgcggtaggaagggcaggtgacggagcaacaggccgcgcatcgctcgctcgctcggtcgcgtgcatggcatgcacgcatggcatacatgcatcaaggggcagcagcgggcacgccacactgcatataacgggggacaggggaccccgcccacacaccctacacccctacccgcccctcagagacgccccgcccgtctccgcatttgttcgcgtcgcactttcatgcacgtgcgcaatcacgtgtacatgtgtgcatgcctgcagtgctaccagtacatgaccgtgggctgcattgatacgtacggcggtgtactcggctgctacaatttcatgatgcaacaggtcggttgtttggttcattcgtttctcattagtgatatggtacatactagctagtagcatgttgcggctcgcgggttggatctgtgcatgttgctaacggtcggttgcattcgccgaagtgccaattactcaatggctgacccggatgggccgggcctcccttgctcgtcctctcgtgcgtgcagcgccaaaacaataacagcagcagctcgccgcgccaggcagtgccgccaccaccgctggctcctgcaatgaccggcgtgggcgggcgcagcaaccagcaagcagccctcatcggcgctattgtgggcggcgtggtgggaggtgcgtggatggacgggaatcatggggtgggtacgtgtcgtgcgtgcgtttctgttcgttgcggggccatgtacaagcaccctgacttcgtacatgtttactataaagacagctgaaagggctgcaggttgtatgtatgtgtgcttgatgcgcgttgccgcacgcgcttcacccactcacaggcatcgtgctcgtggccggcgtcgcgtgggccaccctgctgctggtgcgccgccgccgttatgcggaggcgccggcggcggcagcgtctggcagccggcacaagagcagtgacgacggcgagagcgggggcagcagtagcagctgtagcggcaagagcggcggcggcagtgaccctgttgaagctgcagcgaagccttgcaacccaacgtacgcctttagcggtggcagcggccctgagcacgccgccgccttgccgacagcagtggctagccatttacccactcagcagcagggcaaggaggaaaaggaggaggaagcggtggcggccagccatttacccgctcagcagcacggcaaggaagatgaggaggcggtggcggcggcagcagcggtggcggcggcggcggtagcggcggcgcctctttttgctgatgagccggcctcgctcgtgcctgtgacgcccttgacccctctgcagccccacatccctctcggtgtcacggtctgtgagggcggcagcaccctcgctgcagcaagcaggagcaacagcaacagcatcagtcttggcatccatggtgacagtaagagggcccccgtaagtggcggcggaccaagtggcggggctctcggcggctgcggcaccagcggcagtactgatgctgacagccgcgcactcgtgttcaagggtggcgaaatagcagcagcagcagtagtcggcgggagctcggtagtgccagcggcggcggcggccggtgtgacgaccagcagcggcggcggcggtggtcaaagcggcgacgcggccccaccagcaccgagctcagatgctgcgacacgtgctagcggcggcggcggcggcggtgcgccagcacatgtggtgctgaccggcgtcgtgatgggcaaaggctcatttggcagggtaagtgtgtttgtgtgtgtgtgtgtgtgtacgtgtgtgcagaagcacgtgtgtggcagcgagagtatataggtaaaggtaggtgtgtgggcggcggggaggcaggtacgggagggaggtaggggagggaggtaggggaggaaggtgggggagggaggtaggggagggaggggagggaggtaggggaggtaggtaggtaggggaggtagggcaggtaggtagggcaggtagtaggggaggggaggtgggtagacggcatgtggctgcttcagcgcgactgctcaaccgcccagcgtgctgcttgtgcgccggcggtcaggaggggggggggttgcttgtagatacggcggtactagcccaaactaaaccgaacccaatgcaaaagaagaggggcggagggaaatggaagtctgggatggagacacacaagttacacaagtgagggtgggctgcatggctgtgcctgctgtcccgacgtgtcacccctgcctgccgctgtcctgtcttggctcctcgctcctcccgttagtgtcctcctcgctcacccctggctcacccaccgattctatctgtcgttgcaggtggttgagggtgtgtactgcggcaggcgggtagccgtgaagcagatttacacgggtatcctcatgcaacaggggacacagcagctacggcagcagctgctgacacagcagcagtcgcagcaggcacagcaggcacagcaggcgcaggaggcgcgggaggcgcagcagcagcatcttcaggatgtgcaggacagccttatcgcggcgttggagcaggaggtgcaggtgctggccaggtgcgtgcacggacggcacgggggcgggctagataagagttcgaggcaggcaggcatggcaggcaggcaggcacgcgcttgcgcagcacgcactcagcatgtgtaaccctgtttccgaattggattttccagatgtgcgaagccgtaaaccgcatgttaagcccctcccttacttgctcgtgtacttcagtttcctgcgaaagggcaggcacagtgaaactgtgaaagggggtgcccttgcgaaggcatgcgtaaactgcgctcgtaacccttgctggtgtacttttctttcccactccgcacccctcgtctgatgacacgtgcgctcacccccggtgccttttgcctgctgcacgtgtcaacagggtgcagcacgagaacatcgtgaccctgttggccgcaaacctcgagtgcgtgcatgcgtgggggccggggaacggggaaagagccgacactgtacttgcttatgtgtgcgcgcggcggctgctcggcttgctttgcggcttacatgcgtgctcgcagtaatgacacgcaaccacacgcccaagccggcctcgccaatcttgacatacccattgctcgttcgctcgctccgcgccctgccgcccgcgcgcgctccctgctgcctcgctcacaggccgccgaacgtgtgcctggtgatggagcggatggacacgtcactggaccacctgctatacaaggaccccaacagacccttccccctgtcgctggtgagcgtgcgtgcacacacacacacacacacacacgcacacgcatgacggcagcggcggagcatgcatgtttgcgtgtgtggtagtgtctgtgcctccagccttaccttgcgtctccccatccaagcaagttcatgacagcatgctccatccctgcctggctgctccgccggccccccggccgctttcctcaagcaacccgccgccttcctcatcttcccccttctccccctgctgccatgcactgtcttgccttgccttgccttgccttgccttgcgtgtgcgtgcgtgcgtgcaggcagtgcacatcgcgctgcaggtggcacgtgccctggcgtacctgcaccccaccatcctccatcgagacctgaagccggggaacgtgctcatctccaacgcggatgacacggcggctgcggccgacccgcacaaccaccagcacgttgttgtcaaactggcggtgagtgcgtgcacaagcgagtccaagtgcgtgcgcatgcggtgcatggggccctgtgcgtaagagagagagtgtgtgagtgtgttgggaattcacacctagcatgagaccgatgtacacagggcttgcccgacaccttgttcgctcgcagcacaaattaactgtgtgccgcccttggtgccgccgcatgctttgactcattgaaggacttcggcctgtcgcggctgcttgaaacggtccttgtcacgcaagagcccgaagtcggcacggtgtgtggggttgggtgggtgggcgggcgggggcctgatgccgcacggctgcgatcaacacgctgagccacttgctttaacacagcagcactacgtgcgttctagccgtgatgtctcatcacctacctgccctgctgcgcaccgccgtggtagggctggcgggccttgtagatccaccgccgcgtatggtgcaatgcgatgtgcaagctcctgctgctgttgttacttacagtccttactttgttacgtgcgtgctctcatcatcaggcaccctacatggcgccggagtgctttgacctccagaacattgtcatcacagaccgtgcggtgcgtgcctgcctgcatcatttcgtgcatgtgcatgggtggcatgtctgtgctgtggtgggggcatacgtgagcatgcgggcgatgcggtgtgccggaaggcggggatccgtggacggcggcagccaagggccgtcctcaagccatgcagcagtgcttgcgtgagtgcgtgtgctacccagccgtgccgggtcggtgcgtgccgcccagaaaagccgaagggccggttgctgtggcggcagcgagggccgcgcacgcgctcaagcaggtcatgcgtgcgtggccgctaaactcatgcacgcattggccgcccattcaccaagccagtcacgcacgtgttactcacttgcacccatgtgtctgcccgctcgctcgccatcaggactgctactcgtttggagtgctgctgtgggagctggttgcgcggcggcagccctggtcgaaacaaaatatgatgcaggtggcggtggcggtggcggtgaacaacgaccgactgcccctgctgcccctcgttgaggccggtgcgccgcccaagctgcagcggcttgtgacacagtgcttcgacgccgatccgcagaggcggccggcggcggctgagctggtgaaggagctgctgctggtgcagcagcagttggcttctgggtcgactgcataa

SEQ ID NO: 8 - DNA, 6155 bp, Chlamydomonas reinhardtii
atgttcggggaccccagctcagcatgcagtaccgatgttacaaacacgtggacagggaccgtgtgtaacggcacagtgagttggaatcccgacccagcagtgaccgcctcttggcgaactggcgcctaagggctgctgatcgaacggtagtaatacgcatcatgttgtgagggtgggagaatcggttgtaaattatggtaacagtgcgaacatgcatgtagatatttgtgcagccctgggcgaacgtgcttgtgcaccgtcgaaattcacgcgtctgcgtcagccttcggccgggatcgcacattgggcgtggcttagcgcaacgtgtcgttgttaaactgcactcccaaccacgtgacaggcatggtacggcgtgggctgcacgggagacggatcggccgtgattaacaacacgggtgaggcgcctgcaagtgctgtcgggtgtggccgggctggttgcatgagtgaggatgaacatcgaaagccccgcacacgcctccaggggccttccctgcctcgcttggtccagggcgggtccgggcaggtccggttggttgcccaagggcgcatccccctaccttgctagtgtgaccggcgaaagctccacggctcttgggtcccgacgccgtactgctcggactccacacaacttgtgtgtgcctttcccatgaccatgacctgtgcgctcactcacatctattcacccttgtgtgcaacaggcttcgtggagtcgctactgctgccgaactgcttccctggaggagtcggggtcgcggcgtcgctgccatctcaggtctcggtcctgacggctctgacgcggctggacctcacgggcaacaagttggtaagaagttagtccagagaaggggagccgagataccgtacccaacaatggtgttgatgcatgtatgctctgggacagaggttgagtcacgtaggcacgtgtactgacacggcccatgtgcgttgtgtgggtgagggcaggtggtatgtgtcattccatccagcagccttatgcatgggctatgagtgtttctttcgtggctagcggtgggcctacgtctgccctcttacatacccgaccgcagagccccaacagcggcctaccagcggactactctgccctgaccggtctgcgcctagtgggcctggcgtccatggatctggaggcgggcccggtgccctccagcgggttcccacaagagtggtcctcgcttgtcaacctgcagcagctcgacctgtccaacaaccggtgcgatgaggttatggagacgcgatgggggctgggggatgtaagagagcaacaacgcttacatgtgggggcgtgctcacacgacggtgtgtgcgagggtagggctgtacggatacgggaggctttgcagagagcctcacgtatggcaggctgcccacaacacgccccctctcgtatccattcacaggtatcttggtggcgagttgccgcaatcgtggacgaacatggcagcaatcgtcagcatagacgtgtcgaacacgggggcttgcggcacaatcccgggcggcctgagcagccaggtgacgccctcaggcctaccttcgtcctgtggtaagcgatcgaggcccaatacgataatctgctgcacatggtcatcgaatgggcgattgggccggagctgctttgatgtataactgcaagggcgggcaaagtgctgtaggttgtgaaggtgtctcggcgtcagagctgaatccaggccgcggcttccgcactctgtcgcgtgtgctttgcgctgacttacgctccctccacgcggtgccccacatccatatgctgaaccacagagctggtgaactgtcggcgctacttagtggaaacgctgcagcccatgatcgacagccaggttcagcccggctcggcctgcaacctcaccagcgcgtggcccagcagcttgagcattgactcgtgggccggcattacggcaatgattacggtcgttggtacaacgcccgtttctgacgtcatcggtttcgtgctgaacggttgctgtgagtctgaaccttgcatgcatggcagcacgggcatgtgggcgggatgcaacgcggccctgcgccctagtagtgtaccacgggcgctggagaacacgcgacagtgggcccgctaaagtgtccctgtgtcgcaaagcataccatccggtcgccacttttgacacttgctgctcactcgcaatgctggtgacacagatgcgagcaacggcaactccttcaacgtggtgttgccggacggcttgtcatgcttcggcagcctcacgcagctgctgttcaatggcaacaatgcagcaggtgggcaggggggcacagacgggtggttcccttgcgagtcgcttgcgagagaatgtgcgaaatcacaccagacacatgggggcggcagtgatcacgtcgggaaggtgggggaacggtgctgtttgccgcggcgtcgcccgcctcggtgcaacctgccggtgcgtgcctccatgccgccgcgcaggccccctgccggacgcgtggacccagctaaatcagctgcaggagctttgggtgaccgacaacatcctgaccggcagcctgccggcatcctactccgcgctcacggggctcacgacattgaagcttcacgtaagtgctccggttgtattgtcacgggagcgagggggccacgcccggggctgttgtaatgcaccagtacgtcgccttggctgaccagcccttccttcccttttgtacggcgcacacagcaaaaccagtttaccaacacgctaccgcctgagtggcaggccatgagcctgctcgcagacatcagcatcagcgacaacacccaactgagcgggtgagagcagaggtacactcccccaggttacctggctgagagcgagctaacagtcgagtgcgtgaaaacacagcacacgctcacgccctcctgctggcctaccataacgcatgtgcctgcgcactcatcctcgcagggccgtgccttctgcatggggcaacctcaccagcctcaccaccttcagggcgcggaccgtgggggttggtggccagctgccgccctcattcagcgccctgtcgcttctgacggagctcacgttcgtgtcggacaccctgagcggctcgctgccgagtgagttcactatgcgcagggtgggctttgatgggaggtggcctcacttggctcccggtgccgtctgccgctgtcgttagcatcatccgctgcttgacgtgtgggatatgaccccaacgctgcaggcgagtggagcacactgtccttgctccagcagctgaccatcacttccaaccgagccacgtccacgatgacgggcacgattcccaacgcttggtttgggcccggtggcattaccccttccatgtcgtcgcttcaggtgcggaaggcgcgcggcgtgggttgcgggtgcttccgtctcttgtcaaacatgaaagtggcatccgtgacaagtgacgcgctgctgttgctccgcgcgatgcaggccatcacgatcagcaacaccgcaatttcggggcccctccccaccgacatgtcgcaaattttcagcctcacaaagtaagtaggcgccgccttctccgcacgccttggtaccctccccacgcaacactatgccccgtgtagtacctgacactacatgttcactcgccatgatgacgcccttgcgcttccgcgctcaatccacgctcactccctataatggacacactgtggtatcatctctatttgcagactagacttctccgccaacaagctcaccggcggcccgacaccgtcgtctggatttctgttcgagtacaatacgctgcaaaacctgcagttgattagtcttgccagcaaccaatacctgggcggaaccgtgccatcggcctgggcagttacgatgtccagccttacatttcttgacctccaggacacgggagtgtgcgcgcccttcccgacgggtaggaggttggcgggtatggaggcgggctgcagaggttccatgggcgtgaaggagagccaggggtgacagcgggtttgtggaaactgtggcaagtgaggaaaggggaagcatgctaggaaacattgcaagcgtgcaatcattcaaggctgtctgcacgccctcatccgcctttgcaggtttgaacagcgcattaacacccggcacgtttgtcaactcgtattgcggtaagtgcatgtcagccgctagtatggatggccgggttggcaatagtgctgctttgcgtcgctgtgatcagtatgacggcgcccattacggtccaaccagccaagcaaccagctgctctgaacgcgcccaatcgcctcatatggcccgatcgatccctgtgcgtgtgtgcgccctcatgcgtgcaacctacagacgatctgcccgctgccctcaacctggccacaaactttaagccgcttttcgacagcggcaacgtcagcttggcgtgcgacttgagctcgtgggacatttcaaacccgttgtgcagcaacacgtggagcggcgcgctgtgctcagtcagcccaccagacagctccggcttcagcattgggcaactcacttcactgcaggtaggcctacccgacattgtgttcaggctccgcctgtcggctacccaggtttcaatctattatcccgcctcacactgcgcactcgctgcggtcaaccccacttgacaaggtgcagccatgcatcatcgtgcgtgtctacatgcggttgacgcccttgcctcggtcccgcccttcgcagctcattggctgcagcgcgccagctgctggcagcgcggctgccaggcagctgcccgcaagcattactcagcttcgcggcagccttcaggatctcgtcatctcgacgtcgtaccttactggcaccctccctttcggcaagtgctcgttggttgggagttgccaagctgctgcggcaggcgcactggctgtaggtgcacgagacggcctcagttcgcgagctaccagcagtaatatgccatgccgctccccggctgctgccccttgtaaatgttgcgcagaacttggcttcatgaaccagctcacgcgcatggacctgtcctgtgagtaaagggtaggggaggcgggcactgcagactggatgggctgccggacaggcgctccgagtcagaagcaggggccgggatgccatctgccccctgttgacgcgccccgcctccccggctcaccctcggtagggaacctggtcagcgggaccctgccatcattgtggagcggtctgggggctatgcagcaactggacttgagcgccaacagaaacatcaatggctccattccttccgactggagtggtaagttaatgccacatcggaatcagttcaaacgcacacccgtgtctatgacagcagtccctgtgtccgggcgccacaagtccgtgcgcttgtgcggcttaaccggcggcgtatcaagtcatctggcgtgtggccgcgctccctcaggcatgaactccttgcgcacgctgaacctcggcggcatggacaagctcacaggtacgtgcgtcgtgcgccgtacacgacccgaagtagcatgtatacgtgcagccatgctaaacacaccaacaaggtgaatccaaactgaaattgacatgttgcggtgtacccaagggtgtactcaacttgcattccccaccaatgcatccttacttgccgacagggccgcttccggaaacgctgatctccatcccgggcctcgctgatgtgacgattgagagtaactcccttacgggcacgttgcctgctgtatgggataacctgtttgcactcacaagtcttgtgattggtgcgggcggcaactcggcacccgggccaagtgtcaacggcacctttccgcagaactggttcaccagcggcaacctgaacaacctctgggtgagcacgggcgggggaccgggcggtgtaggcatcaaaactcttgggagagcattggtgtctaaaccctgcacattgtttccttgccctggtaaatcatgctacttgttgcgcagaacctgcgcatagcgaacacgaaggtgtccgggccgctgccggatcctggcagtaccttccaagccggctttatgggtctgacttctctggacctcagttccaacatgctcagtggaaccctgcccgactcgtaccagggcttctcgtaa

SEQ ID NO: 9 - DNA, 2181 bp, Chlamydomonas reinhardtii
atgcaggaggtactagctgcagcgcgagcatcgaagcaggtggcggagtacgcggaagcatcgcgtgtgagggtggttgatggctggggcgacggcctgcctgcggccatggcggctgcggttcaggcccgcggtggcggcctggtccgactgagagtgcgtcaggaccacgaggtgggtggtgtggattgcatgcgggggctgcgagcaggggagagcacgtcagagagctgtcgctggggggctgggggcctggctggtggggggagggcacagctgattgaggtcgagtgggagtggggatatgatgtacgcgtggggttgtgaggccaacgaccttcctagggctgggtgctgttattgaggccactctcctgggtgtgacgatatgctgtttttcatgacaggtggtgcagcgccagcgccgcagctggcgcgctcgagcggcacttgtggaagcgctggggattgagcggtatgacaacccaagctcagcggccaagctggtcctgctccaggcgaaacctggtgctgtgcttgcggacgtgtcgccgggggagcacatgtgcatggtgctgagcgcgctgctggggctactggcgtgcccagacctggaggatcaggtgtacaacgaaatcgcagtgagtggcgggcaggggcctgggcaatacagtacggtgggcgtcgaactgtatggtgatgcccgtgaagtggtggggaagacgggtcatgactgcgaccaaacaaggagtgacgctgacaccttgtccggggtcggggaagcgaggtgccgaggtttcggtcttgaatggctgcggtccttcgatcgctcggtgcacctccggtttggtttgcagagtgtactgagtgttagtgaaagacatatgaaccgaaaataccttgttagaggcctacttggcgaacatctcgtcgcagacagcgtttcaaccatattgtcgccagctaggttacaccattggaaactagagtgcgtgtccaggcctttaaaatacgacattgtgataagggagggtcgcggcacccgccctcgggaaatgtcaaggcaggtcaggcttccagcaccagagtccctgtatgtcaatggatggataaaaatggggtatgtaggggtatgcaaattgtgccggagctcaccggttttggactcgtgcggagcctcgaatacccgcctcgcgaacctgctcccagtcgtgtttatgcgggcccccgagtacagatttgctggcttggtgacggtgcgatggcccacggttcatgactggggacgttgacgggctctgaatgtgtggtttgcccgcagggtctgcttgcgggcgtggagctggaccacggacgggcactgcgtcagcgcattggcgggaagctgcgtgaggcggtcgaggtgctggaggaatacgtggctcacctccggtcaatctcggacagcgcgcagctcccaaaagctgagcatgagctgcggcgggcacaggaagcgctggagatgttggcggcacccgccgacacagacgacagcatgctggaggtggacaccgttaaggtggtcgtggacatcatgactgggctggacgttaacgtcctcgtagtaagcctggtcgaccagcaggacctgggcgggcacgtcactgcagcgtacagccggaccacgcatgtggcgctgcgcgagctggcggtctcgggcggtggcgccctggagctgccctcatgcagcactgtagtgctgttttttgcgcacaatcatgcaaactccgttctgctgggcaaggtgggcgaccagaagacggaggtggaggtgctgctggacatggccgcggagacgcacgaatggaggcagggcggcgttgtgtcactcggcagcggtaggtggggggtcagggaatgggttgcatgggagcacatgggcatgatggtcgtgcttctgtggagaggcaatggcagggagctatgttgttgatggatgccgtgtgtacaaatgcggcaggtggcgcaattggagcagcggcagtacagcgcgggtctgcggctggctcgtttgtgcagccgcagtctgctgaggttttgcacaggttcgtgccaacttttgttccttgcgcttctgtcctgcagcgcgcggcacaatgggtgcagctcaacgaggcgtgcgtaggtataccccagacttag

SEQ ID NO: 10 - DNA, 9535 bp, Chlamydomonas reinhardtii
atggtaagtaaggacttctgctccgagctgcatttgtccctgctgtacctgctccgagctgcatttgtcccacacacacgtgttaagggtgggctgtctcctgcgtgcgtgcctgtctagtatagtacatactaaacatatcatttgcccccttcacggccgcgcgcggccatttgatgctgactattatttcgatacgccgcttgcttgtgtagatattgttgactactacaccagcttcgagccgctacccatcaatgccaccatgtatgattggtacggccaggcctgcaagggctacgccacccagccccccgtgcaagtccggctgggcggcctgcgcaccgaggctgacggcacgctggtaagcagtttaaatggcagacatgctgctgatgcgcgccccgcggccggaggtcgatgctgtgcgtgcattagtgtatctatttcccagcagacaatgtgcgtggtcccagactcccccctcattcatcacggaccgcaggtgaacctggaggcaccggagaacatgaacaagtccggcctcacagtaagcactctttgtgctcatctcctacccgttgctgcatacagacatactgactgctgactgactttcgccgagtgcagcagtctaaacccgcgctgcccccccgtacaagacttccgaccagcagccaagacacttatgaactgcttctgctgcctcttacaattaatactatctactgccatggtggcgtaatgtgcagattgcgggtcgcacagtgacgatgtcggacaacggcctggcagtgttccagaacacacgccttcgtgcgcccgagggcccgcgcgtgctggagctgaacgccacgctgacgaagcccgtgcgcgagctggccagcgtcaaggtggggcgggcgccatatgacataacatactgagcttggtgcaagtagtcagcactgccccatccttggctggtgactgggcccacatccgtagaaaggacggtgtcaaggcgggagtgatgagccctcgtttatggagaggtgccacgcacctaattcgacgtcccctcagctgttcggttaattaggtccacgcgggttatgttagacaatggaagagcactacgcagggatgaaggttggtggtgagagtggcggggtggggtgggtcggggcgcgcggcggcacagtcatcaaatgcggatacttagctgtacgatgtgtacacatcggacatgtttacatgtttaaaggaagaccccccgtttcttcaggtttagcttggtgtgattttgatgacatacataataggggcccttgggtaggggccttgcttgatggcggcacaacccgcaatgaaacacctgcaggtgctggtgtacgtgcggccctgcaccattggcgagttcctggaccccaccacaaaggacatgtgcattggctgcccgctgggcacctacaacatgatgccagccgcgacccagtgcgagacctggtgagcgtgcgttcctgcctgcctgcctgcctgcctgctctgctgcctgcttccttggctgctgtgcttgtgcactgcgggcatcttccagcgcgcaatggcatgcagcggcacgcaaaacatacagtagtgcagctgtccatattgagcgctagttgcatggcgtgatcctttgctttgcttcataccgcagcccggacagcaccaactgcacggcccctgatgagggcgccatgatgctgcccgatgacggctactggcagagcaacctgtactcggagcaggtaggctcatgtgtcgctagctcagcagggtggagtctggggtgagggagccaggcaggaacatattcggcggggaaataaaacgtggtggtccgaatccggtagtatatataatcggaatcccatccggaagctgttgggaaagagttgttggggcgccgggatgtgcagggagagcacgggggtgggtgggccggagagtgtcgggacgggccccgcttacagcagtggggggacacgcatacctgctgcatgggtgctgccacgcacggcagagagcgtgcgacaaatcagggttttgcccggacctacctgctggtcgatccctccctatgacccgatctggacagcctactactacgccccgcacgcaactttagaggagcgcacataagtgggctattctgccgacatgaatcacccggaccccaggcagaaaaactgcaagaacatgaagaccggccgccgcgctccgcatgtgcacagcggccggatggaacgtacgtgatgcacaaccaggacacagttatcagcagcctcgcacataccagcagcacagccacaccctacccccatgccatccctgaaacgctggcttgcttagatgctcaacgcaattcgtgcaccgccgcacctgctgccgaaagctagtcaagcacgcccttcacacaaccgccaccattacagctcttacttcaccgggaactctgcagtcacccagccatggccaggacgcccaccttaacaaagcatgcccttttgtgagagtgggcccaggcccagcgcgcctaggtgcgctgtcagcctccccactctaagtgctgggggacaggggctcagtggcggagaccactcgtgtggcggtctctcatgcagtcatgcccccatgcccctacctcctcagaacacgccctgtcacgcactcattagttttgccgggacgggcggcggggagagcgcaggcgggacgggtgggggtcgccaaaagcctggtccgacccctcgttggttctcagagaagggattcggactaacttcattcggacagcgggcattcagacggaactgagacaggattcggacgcgaggctttcccgatgtatggacaggttccactagcatggcgtttgactgttgtgcaaacattcatgcatgcaccatatgtgcaggtgctggagtgccccaaccccgactcctgcacgtacgacgcccgcgaggactcgctgcgtgagatccaggcggtgacgtggtgggcggtcaagtggatgcagggcaacgcctcacagcgcgcctccatgaacacactggcggtgagactaacagcagcaactcgctcaccccaccgggtacatacgtgccgttgttctgcgctctgcctacctgtgtttgtccacccacacactcatcacgcaccttcattctgccgctgtggttggccaacgtacattacggtaatgggtcatcatgggtaatgtcatgtcctactacaggggccgcgcagcccctttagatagggcaaaatgaaatcaccatggccgccatgcgcgatcccaccccctccacaggaccaaaagtggaaagacctccttggccggcgccagcttcgaacgctgggggccaacgtggacgtggtgaagcccattgagacaatgagcgatgaagagttcgtgaacgcggtgtacaacctgacgtatgtttacaaccagaactacaccaccaccctgtgcgctgagggctacatgggtgagttgcttgggagcggaagcgcgatgggcggcgggggcatgcatgtccaagcaaaacccaggagcggattttgtgagtgcgacagcagaacatgctacacgcttcacccacacgccgtggcttgtcgaccgtacgtgctgtctcaccacccccgcgcgccctcatctgtgagcccgcccacacgttcatcattacaggcacgctatgcggcgcctgccagcccggctggggcctggtggacgaggccagctgcatcaagtgccccgccaagtccctcaacgacctgtactacgccctcgccaccatcttcaccatcttcaccatcggcatgacagtgctcagcagcctggaggcgcagaagaccgcgcgcgacattcgcgaccacggcctggacgtggcggaggtgcagcagcacaccgagaggctgcaccagctggaccccgcgggccagggctggcacggtgcgtgtgcgtgcgcgtgtgcgggtgtgcgggtgtgcgggtgcgtgacaagttggcgcgtgcgtgcgagtgcggcgacgtgggtcttgttgggagtgagggcggcggggctggttaccgtacgatgcaatggcctgatgcatggtgtttgctggggcttcatgtgtgtcgcacgcgtgcggacatgagacttacgtggtgcgtggtgcgtggtgatgaagggcgcggcggtgttcccttactttatagtacagggcacacggtggtcggttgcaatgcatggactgctggtggccggtggcaaagttctctgggcgttccggttgccgttgccgctttccacgcttacatttctcaaatgctcactaccccgcaggccaaacctcgctgaaccccgtgcgcgactccgtgggccctgttgatggcagccgcccgggcagccgcgccgccagcgtcaccgccggccccagctcgggcacgcagctgccccccgccgccgagggccccaacggcagcaagagccccctccgccccggccccgtggcggaagccaccgagaccgacggcggcgcgcccgctcccaccccgccgcccgccgcctcactgccaccggccgcgcaccagcaggccggcggcagcgccaccaacggctccggcgccttgaacgtcggtgctgtcgcgctcctgtttgacgggcagcaggcagacgctcacaagcccaagcccgacatcgcatctgccggcggcttggcgtccagcttccgacccgacaagagcggctacagtgcaaccgccggtgccagcggcacacagcgccagggctctgtgcagggaggcgtcaacgcgtcgggccgcctgccgtccaccaaggaggcgtacagcaagtaccaagggctgacggagtacgagattgacgagctcaagcgcgcggaggaggaaatgagggaggaggcgctcaaccgatacgctgccaaccagtccacaatcatgcgcatcttcatcagctacatccaggtgcggggtgggggcggccggtcggggccggtgcagccgggcaggccggcggcggcggagccagcattggagccggggcgtggggagcatgggcgcgggcgaggcgcccctcataatggagtagcgcgggctggtggaggagcggtctggtccggcagttagaatcgtgcggtgcggcgcgcttgagcccagcgtgaggagcgcaggatgcataactgcgaggctgacaccgccttgcgcgccggtgtcctgtcccttcctcaactctcctccctcaaatcccctcccctgcacaggtgctggcgctgctgcgcaacgtgcccatccgctaccctgacgcctacaacaactacctcaaactcaacaaccaggccaccgcctacccaggagacatcgtcaccatggactgctcgctgccctacttcgcagccggcggcctgccgaggtccatgctcaaggtgcgcacgtgtgaatgcggcaggcaccgtcctttcagcagggtagcaccgggcggggctcacacacgttggccaggcgtggtttggcaaatgtgtcccgtgcccgcccgcccgcccgcgtgccagctagcccacctactcggcttcacatgtccacccgcatgtccgcattgtccgggactcgactcaccccccgactattgtcgcgtgccactccgttgtcaagcatatgccacgctctcctccacgctctattgcattgggtttggtttagtttgggctggtatctacagccccacccccacccccaccaggtcatcctgagctgcgcctcgcctctctacatcctgttgggcttcgccatcctgacgcttttcggcgacatggccatctactacaagaagcggaagtgagtgccagcagtgatgccatgggttacctgggttgcaggatgccagggctgcaggagaatccggtttctccgcatgtgcacgtgcatgcgtcttgcggttgcagcagaagaaactcagccgcgccgctgacgctttgcataatgtgttttgcctagtacgacttatgacaccctgtacggtactcatgcgcgcatccacgcaggtcgcgggccaagctgatgaaggcgaccaagaagcgcgggatgagcggcaaaggcgtgccgctgggcgagagcgtggagggtcccgagccctacgccgccgccatcaccactaccacttccaacaataacaacggcttcaccaccgtgaatacctttgcccgaacaaagacctccggctccgccacggcggccggcggcgctagcagcctgcctgtcgccaacagctttgcacccggcggcgcccagcctgtgtatggcttcaactctggggccctgttcttcggcctggtcaaggacaactactgccccacgggccgggacgacccactgcgcaactacggcgcattcctgtgggaccgttacttctcacaggtgtgggcccagaggagggtgggggcgggaaggcaggccagggttcgagggaggcagagagagggagaggaagggagaggtaggaagagggatggacagcgaagggttgagagagcaagggtgagacgggttggccgcaacttcccacagggaccttcaatctttgcgctcttggtacacccaccttgcaggttctggttatgatgattgtcatcttctttgttctgtacccggacgtgagtaccgggcagggagctgaggcagagggtctgagcccaaacgtgtcttgaacgcgtgaggatgggttgccagcaaagaggcccgcgcgacgtgtcaggagtaagctacacgcgcgtgccttcatgactcactgccccatgccgcgcttcatccgcgcttcctctgcttcggcctcccaggtggtggacaacctgctcagcatcttctcgtgcgctgacgtggacttcgacaaggacggcaaccccctggcggtgggtgtgcggggctggctgcggtgatggcgacagtttacggcggcggtgttgcaaagcatcaatggcggcacggggcacggacgttagcacttacatgttgattgccgccagacacacatacacatgtgctcgcgcgcaggtcaagatgggtctgtacaacaagcaggtctggacggtggactacaacgtcacttgctacgagggacagcactttgtgttggccatggcgctgggcatccccgggtgagcaggaggcgctgcgtggcgtggtgggcgcgacagggcgggaaaggcctctgggcgacgtcccaggggtggctccttcattcctcgtgcttgcatgccgcctgggtcccaccgccgccacgccacgccgccccgcccgcccaccccgcaggatcatcctgttcgctgcgggctggccctccatcaacgccgtgctgatgagcccgctgggccgccagctgtgcggccacaagacgcgtttcactgaggacatgaccgagtactacctgaacgactacaagcccaagtgagtacggactgtgccgcaatgtgcgggaacttgtagaggtgaaaggaagcgcggcggtcgcgacgcacgctgcgttcagctcgtacggacggcgtgcggacgctataacttctttatttcacaaccgaggactcggcggtcttattaccggtgctaggcgcttgccagtttgcttcatctatctgacccgtgcccctgccccgcgccccgtgtgctcaacccgcgctggtgcagctttatctggtgggagtcccttgtgatgctgcgcaagctggccatcgcgctggcgaccaccttcctgggtagccgcgataccgacaccggcctcaacctgctcatctgcatgtccatcctggtggtggctgtggtgggtgccagggcgtgttattcgcgagggcacatgcatgtgtgtgtgtgcatgtgagggcacatgtgtgtgttgtgcgtatgtgtgttgcgtgtgtatgtgtgttcgtacaccgtatgcccactgccaggtgcacgggcgagcgaccaaggcgggcgcatcacgcacccgcagggtcccagcgtgccttcccacacacctcccgctggcacttctccgagtccgggataccacgggcatagcactgacccgtctatcccgccccgcccttgctcccctcctacctccacctccccgcacacgcgaccgcagtcgctgcagctgtggttccggccctatcaccatgtggagaccaacacgctggaggccggctccatctgcgtgctgctgctgacgctgtacctgtcgctctacttcctgctggacgcgagcgtggtcagcaacagtggagccatcgccgtgtctgcggtcatcatcggcatcaacgtcggtgagcagggatacgggcagctgggatggttaggggatgagggcagctcggatggtcaagggatgttggggatgtgtacgggaagcttgcgtgtggggcaggttggctggtggcatccaagtgtgcacgtacggccttcagttgcgcgttcctcgagcatgcatgcataccgtacacttaactgcctgtcgcacgcgcctaccccaccccactccatgcctccgatggcacgccctgacacctgaccccttcaccaaccccagcggccctgaccccacgcccctcgcccctctgcgccgccgcctgccgccccctcactcgcagccatggtggccatcttcctgtactacgtcatgcgctcccactggcacacctacatcaaggacatgggcttcgatgcggaggtgcttcacggcatgtcgcgggcccagatccaccagcacgtgagtaatcccttgatccctgaggcttccgtccggagcggcgcgtgtcaattgagcttagattgctgtcggggttgcgacgaggcgcgctggttgattgcccctcgcgcgcacatcccgcccatgtcgccggcgtcacccgaaccccgaagcgctgcctggcaccccgtgcggcgatggcggcagggcggccgccgcaacctgtgttctgcgcgctgggcttctcctcccctccaccttatgccaccctacagccaagcacgcctggcccatgccaaccatggcgcctaccaccgtcagcactcccattccccgctacccatgcaccaccccgccctccgcggccctgccaaccaccgcgtgccgcttgtccccgtgtcctttccacgtcatcacagatgtccaaggccatggatgacgcgctgcccagctttgtgccagagagcgtcaagtccgtcatcacgcgcgccgccacaggcacgttggcacacacggtggcccttcagaagcgcttctcctcacccgccagcctcaccgtcggcacctcggccgccacaatgggcacacacatctccggcccgctcagcccgaactcgccgtctggcgccaacggctctggcagtcccaaagtggggaccgtgaactcccttggccggccgcagcagcagggccagcccgaccgcgtgaacacgctggggcgcggcaaggaggaggcgaagcccaagcaaagcatcaaccccattgacaggctgaagtcgaacaagtag

SEQ ID NO: 11 - DNA, 2775 bp, Chlamydomonas reinhardtii
atgatgaaccgaaaagcttggcataggatggtgcggcaagtggaggtgaagaaggccattccaaagccaaaagagatgacctgggacgttgtactagacctcgcaaacgatggacaggagcaccatgaaggtagtaacaagctaacagcagaaggtgcgtcgacggtcgggcaccgacggtggccaagggcgggcggccacaacagccggtcgctgctatttattagttaccgcttttgtcggatggaaggtgctggtgctaatttgggtgtggttgagggctgggcaatacccacgccgttttacacttctgcaacctgcttcgcggtgctccacatagctgctcgacatgactcgctgataatcttcaatgttgggccactggtgctgtcgcccgggggtgctttggccctgcccccgcctgccacgcttcgtgccagaccgtgccgtgtatgctctttacggcgctgctcgttcgccctcacgccctaattgcagttgagacctgtcagcccaatttaactaatgcacctcagctgccagcagcttgcgacacggtttcaactcctgctgaaccaccactgtgactacaccaattgccgccagtactgatccacccacgtgatccacccctgttgctggcccctctgctgtctatccacgctgcagacctcgtccgtatcaggactgcgctgcacatgctggggaaagacgagccagagcatggcaaaacggaaatggataagatcgcgccggatgccgtggagttcaagttgttcaacaaggccaccatggaccgcggagacctggtggccttcctcttcatcatgggagtggtgagtggccgagtgcggcttgttacgctggaatgctgcggacgcaaagacgtgttcaggtgtggctgatgccctacagaggtttcgcgaataccgtaaaggcaggcccgtaggctcatgggttggacggtgatggcgtgtcgccgcgaagcctggtcggcacggcagccacaccaccactcgccctctattctgtttgcatgtaatacacatgtaacacacacagtgtggaactccgttgtgccacctgatttgataatgaatgctgcaacgctgtgccgcgccgcacagagcgccacggaggacgcactgcatgcggagctgcgctacctcaagctcacgagcgacctcatcacgccggcgcaggccgtcttcgtgtggtgagcgcgcggcgcgacacggcgcgcacgcaggcttttagtaggcttttgagggcgagctcagtgttaagatgatgccagtttgaactgtggttgtactgccgttcaagtgcggttgaacacccgggacaccgctccgttgtccatgtcttgggaaaggctcacaccatggaatggctcactgcgattgcttttttatgacgccttggccttgcgcatgctccccttgttcgcaacgttgaaccgggcctttcaggatggagatgaaggacgacgaaaaggatgaagacgctatcctcaagcgcgcgttcatgttctttgacaaagacggcaacggtgagcgcgcgggcctgctggtggcgggctagctctggtagcgaacgggtacaagcagcatatgcataccgtatgttgtcgacttggccactggtcgtgatgctgtcaatccgtttcggcttgcttgcaggcgagatctctgggcaggtgcgcgttgaggccagcgacatacaaggctgtgctgggcgggcccgcagcaaaagggtggctgcacagctcaggggccgtgtcgctggtctgtcagtcgctgttggacgcacgcccgttcgttcgctagctgcaccgcgtacacaccctttagcgctgcgccactgtcaccaaccagcaacctcctggacatcattgtttacaactcacaggagctgcggcaggccatgggcgacgtgggcaacatgctcacgggggccgagatcgacgagttcatggaggtgaggcaggacacgcgccctgggagaaacgacgcgttgataggcgttctcctagcatactgtatgctgcagcggactcggttggcaaagggttcattggctgtcggatcatagtggaagtaccgtagatcttgggcgcttatgccgtagcactgcggtttgacgccaagatgtcaccccggggctcagccccgggggacccattttggttgggggactggcgtgactgggccgggcacacgacacattgtggccttatcagccccatgcaccctgtagggcatctaagcggctgcgaagcgcagccctaatggcattcatgccttgcgacgtgctgtatctgtccttgcgatggccactcttgctcctttgcccccacagctgatggaccgcaacggtgacggtgtggtgggctacaacgagttctttgaggtgctcacgaagcagaccgacctgggccaggtgctcaagtgagtaccgcatataagagttacgcaacctttcgtatagcgtatgccgtaatacggtactagggcggggcatgatgcgtggcgagctccatcaagtgcactggttatgggagggcgtgcactgcctgtgtactagccggggtatcttgagcaacaccccggggccgccaaagcacgcgggccggctgtgtggtcccctgatggacatgggatgattgctacggtctcagcgcctgcgcctatctgaaatacttgcccttgtcttctcttccgcagcgacgtcaagaagctggacaaggacatccaggacatgttcaattcttag

SEQ ID NO: 12 - DNA, 2896 bp, Chlamydomonas reinhardtii
atgtttggacgttttcgaggcttcagggaccgcctcaaaaagcgtggccatcatgtcgaagaagagttgacgctagaaaactcaaatttgacatcggcacaaataggtaaggatagcgggcactcgaatgtcggttcgggcacacgagcagaggccgcgcggaactgcgactcggacgggcccttctacagtcacccagattgagcgccatgctgtatgtgcgaatggcgcttgcccgcagcgacggccctgaaggccctcaaaattctagggctcgagcccaagaagcagcagctgaacaagcaggacttcatcgtgtttctgtatgctatgggcctggtgagagcttgtgaagcgggcgggcgggggggggccgggcgggagtcggcttggacgacgcggtggactgggtagctggggcacgcaggccgccgtgccgtgtgcccctgcacaaaacaggtccgcaacctccgtgcttaacgttgaccctctagctgaaatgaggggcttgtacggaaaaaagaatcttccacagccaggaacgcgtgctgtgggaagctcccttcatggttaagctgcgttgcgttttctcaacgactaggccctgctccactccggcacgcagaaccccacggacgacatcattgactccaaagtccgcgccttcaaactgcaccacaagaagacattcacgtttgggcagctggcgcacgtatggtgggtgcccagcgcgtgtcagcagtgcctggatcgggggcggtctggaggcgttcgtttggttttcgatcagggagaggcgtgagcacgggcgacggggctgagggcggcgccaggagactgtaagaggggagcactcagtgccaataagactagcatccggagccacataacttgatgctggacttcaccactgcgctgttagaacgtccgggtataaccacctgccaactgcgtgcctgcgccgcatagcgactcctgcagactcacaaggccttgccgtttgaattcgtgcacgtgcgctttgcaggtattccatgctgcaggacctgacggatgaggacgagattctcaaacgcgccttccagttctttgacaaggacggcaacggcgagatcagcgtgcaggtggggccgcagctagctatatggtaaggggccaagagggggaaagccgttcatggtaaacggaaggggtggaggtggcggaggaacaggagaggaaggggacgggaggaggggacggacgcataggggggggcggacaaaatggtgcggcagagttggtgcagcggggccgggctgccgatgattcgcgaatgccgcgcgccacatgtggaccatagcttccaacgtatccggcatgtgttcagcgctgccgttgctgctagaccaacacatacgtacatcggatgccgtatacaaacctacaggagttgaagaccacgatgcacgagctgggcgacttgctgagtgaggaggagatcgcggccttcatggcgatcatggatgtcaacaacgacggagtgattggggtgcgtgggggcatgttgggccggaggggaggccgtggtggccacggggtaggccacagctgttcggctgttcggctaggattcgggccgttggcagagggctgcacggtggggtgggttgcgcccgagcgccggctcgggcaactcacggcagctcacggggtggccggcatgcttgagcagcagcccccggcaacgtgtgctcgcccgcttcccctcgtactcttcctccccaccgtggatcccccccggactcggtgcatttcggggatggggactacgtcgctgccacatcgttgtcaagcataggccacgctctcctcctcgctctgttgcactgggttcaatttaacttgggctggtgtttacaacccaccccctcctgcccctcctaaccggcccctccctcctcccttcacatcaccagtacacggagttcctggccacgctgaagacgcaggcgcccgagctgtcgggcgacaaccacaagctcaagacggcaatggagggagacaggaggtgaggggatgagggtgggggaggatagcggctggggtgatcgcgaccggaaagcgatgtggatgtggcaagacgatgccgtgatagcaattgcgattccgcaccagctgtttgtgttgctcaactggtgtgcagtgtaacgtgcgctcgcaatcgctctagctccattacctttcttctaaccttccgtatttcttcatttgcagtgtcgcgggcggcctcatgcgcgccgacgcccgccactatgaagacccgggcctgccgctggcgggcgccgggcccagcagcccacacgacacactgctagcggcggcggcggcgctgtcgccgtcagcccaccactcacccgccgggacacacaccgggctcgcgcatccggcgaaccaggcgcacccgcagcagcagcagcagcagcagcagcagcagcagcagcagcagagcctcaaccggcgacaccatcccgaactagaagaggcggctgtgcaaggcggccgggagggaggcctcaaccgcgggagcgagggcgagggcgtggggataccggaaccgtccgtagcggcggggatagggccgggcgcggtcggcgccagcaccggccggggcagcggcagcggcgaaggcagtgcgggcggcgcagggccaggctcgccgcggcgacaggcgtcgctgcgggaggcacaagcggcagaggcgcgaggcacagcggcgacgacagcggcgatggcggcggcgctgcagcggccgagcagcagcagtacgcgggacggggcggcgcttccgccgtcgtcaccgccgggcgtaggcgctgcgccgctggagcgcagtgggtccaaccacagcaggtag

SEQ ID NO: 13 - DNA, 4992 bp, Chlamydomonas reinhardtii
atggaggtgagtcggtgacgctcggggctcggtggcgagcaaggaccaaagaaaatgagcatccgcggccccggataatgcagcgaggcccctcgggtttctctgtgttagtcgaggatatctacgccctacaaaccttacccgggcgtaccccgggctggctaaatcactgggcgtggacctcgaagaggcaaagcgttcgacgtgaggcagcaggcctgcggctgtgcggcatattcaattcgtcgttggctttttgcagagatgggtagctgctggtgtcgtggggcatttgactgggcgagcagctcggcgaggtgaccgctctggggcggttcacctcgagacgcctttagtaaatgccaatccataaagcataggttgaaaactgaaaaggaagggctggagggcacgcagctttaagaaaattgggagcgtcaactttcgctcgcccaggaagctgaccccactgttgcggtggcggacgtagtgcttttgaccgtgcatgaggtgaaatattgttttgtgtgctctaaaacagctagtgtcgggtcttgcggcggacaaggcttgcactcgactcgcgtatggggttttcttccggttaccctcgccacccgcgccccaacgcgccacgttactccgaccggcaccttaggcagactgaacgcctcatgaacaactggtccactgtacatgtgacacctctacacctcgcagaaatatgagttcctcagccggacaggagagggggcgtatgggtcggtatggcgtgcccgggacaagaacacgggcatgatggtggctgtgaagaagatgaaggacgtgcctaccacagaagaggtgcgttggcggcaagctttgattgggtgagacctgacccacgttcgggctgtgtcagcggcgcggggccgtaccgccatagtcacctggaccggaatcggcagcgttggcatgagcgtaccatgtgttcgcgttaggccttaggggcatagcggctaacctgggctgttacgttcgcgggctgggctgggttgggcccgcccagtgggttgagcaacacgccaaacttaaggtataactgcctgtcctgtcacgcacacaggaaggggaaatcgccatgcgggaggtccgtgtgctgcagctggcgaaacacgtgaacatcgtcaacctgctggaggcatataagagtcagagtgggcgcctgtaccttgtattcggtgagggggggcctcgggtagcacaattggaacgtggagccgtggccgaggtcgcggctgggcgggcgcaatggcagccgggcgtgtactgctggatggctgacgtgcttcccatgcgcgttgtgtgcccatgcgcagagtatgtggagcgcacgctacttcaagagctgaaagccaaccgcggcggcatgccgcccgctgctgtcaagtcgttgacatggcagctgctgcagtcgctctcatacctgcaccggaagcagatcattcatcgagatgtgggtgcggttcatggggagcacggacggtatgggaaggagtggcagttcgggttttatgtatgggacgagccttttgcacactgcagccggcgccctctcaccgggcgccccatgattcgtctgcgcaggtcaagccgtcaaatatcctgattacggagagcggcgtcctgaagatttgcgacttcggatttgcgcgcgccatgaccagctcctccgcggacccagcctacaccacgtacgtggtcacgcgctggtaccgcgcgccggaaggtgcgtgggaagcgggctgggaagccctctgttccttgatcgctgcttgctttcgcgcccatgttcgacccagggctctggtaaacaagttgaaccttctaaaccaacattgcgcgtgcctcactgtgatccgcagtgcttgtgggcgacaactacgggccgcctgtggacgtgtgggcgctgggctgcatcttcgctgagatgttggcgggccggccactgttcccgggcaagaatcatcacgaccagctgtggctaattctcaagtgcctgggcaccatgacggagcggcagctggagctgctggactcggacccgcagtttgcgtgcttcaggcttcccacgcaatcggagatcgagccgctggagcacaggtgggccggtgcaggcagggggcagcgtgggggcacgccgcacaggggggacgccacaactgataccttgttatcaaggcatacggtaggtttgcctgccggacctggcgcttgaaacgagccccgtcaagcgctaacggtgttgtgttgatggattgcatgcctgcaggctgagcgcactgagtggaccggcgatgcagtttttacgggcgtgccttaacccggaccccaagcagcgcgccaccgcagacgagctgttggccatgccgtacttttcgggtgtcacggacgtgctgccggtggacgacctcatggcatacccggtgcgtgcatgtgcgcacttctgttacgtatttttggagccggggctgcgggcagagccgtacgacagcagtttacagtcttcgggttctaacatgtgttcttgcgtgttcccttcaacaggacgccgacctgcgcgcaaagctggaaaaggcggtggcgcaagacgccgcggccgctgcagcagcagcgcagcgggagtccttgctgttgatgcccagcaccagcaagcgcggggtgctggcgcccactaacagcaagcagcacatgaacccgcacatgaacggccaggccgtgtcacccggccgcaatggctcgggtttgccgctggtgcaccaccagcagcagcagcagccgctgctccagccgcacagcagccagcccatggtgggtccgctcccatccaaggccgccagtgtgcagcagctgtcggcagtgcacatgacggaagcgcggccgccgctgcagcggtacattacggcgccggcgggcagcatcgccagcaaggtcatgtcgcagccgccgccgctgcagccgctgtcgcaacacggcggctactcgcaggtgccgcagccgcagcagcgctcccgcccgagctcgggtggcggtaacaacagccagcagccttcgccgtcgggcagcagcacaagcaaggcgtcgtcgcagcagcaggtggggccaccggggccggtgcgggatgagcgtgaccgcgagcgcgaacgggcgccggcgccgtccgggaacgcgctggtgccctcaggcatgaacggcatggggcttggcagcggactgcccatgcggcccacgcgcggcacgtggcgattcagcggggacggcgaggcgggtctgcctcccaccatcactcgccagctgtcgggcacggtgaatttccagacctacagcggtgcagcagctggcggcgggggcgcggcaatggagcaggggcgcggggggccggaccacgtgacgccctccctgcgtgcaccgcagcagcgcaccacgtggaatggcgctgcgtcagctgcgcagccgtcgcaacgaagcggagccagcaacggcggaggcagcaacaacaacagtaccagcggtcaggaccagggccagtcgcgcagctcgagcatgaacgggcaggagcagggcagcagcactgctgcgcaccgcaaggcgcacagcctcgcgggcaacgaggggctgcacgtgaacggcgggggcggcggtagcgcgacgctgcgcaacggcgtcgcgcctggcggtctgactgggctccaaggccgcagcctggccccggcgccagctagctccagcgggcagtcacaggccacgcacccgggcttcccatccgcaaacgcagctgtgcggctcagcccctcgccgccgcccggtagctatggtggcccgctgcggtccaccaactcagcgtcgctggtgcagccagccgcgcaggcctcacagggtcgcggcagccacgacggcatgggcaacggcccctcgggtcagctgctactgggcccgtctgtccacggcatctccatcgtgtctggcggtgggggcggcggcaagacatccaacagcggctttctgccgcagcccgggtatcccgggagcacctccagcatgcacgccggcggcctgctggagccggaggcgtcggactcgagctgctacgcagatgcctctgcctacctgaacgacggccggcgtgcgtcagacacagtgctgtacgcggcggccgccctaaaagaggcgaagcataggcttgacaaggcgtcaaacatgatctcagggaccagtcggccgccagggctgctggacggcgtgccggtcgctaacggcggggcggtgggcggcacacttgacgggggcagccgcagcgtggggctaggggtgctgcgcgcgccttcgtttggcaggacgtctgggccgcccacgggcattccgaacggcccgccgtctccagacaccgtcttgccatccaacctgccgccgctgatgggcggcacgccgcgccgcatctcggcgcccgagtcctccaccacgtcgggagcgctggcggcgttgaacaacgctaccaacggcggcggcaccggcgcgttaggcgcaggcagtggcagcaacagtagccgcgcgctcatgggcagcagccacccaccgagcggtggcggctacctgcagcggcacaacaacaagcaacaacatcagcagagccagcagcagcaggcaaacctgcatggccaagcattggcgcagctgccgagcatgggcagcggcgatagcgacgagggggcccaggctgccaacattagtagcaatggtgcctcccatgggaccttcctgcctgcgctggaggtcgggaagccgggcagccgcataccgtctgcatccctggggtccacgtccggtgtgggcgtgggccgtcggccaagcaagggctcgctgcgctctgtgggcccggaagcggcccactgcaagcgtgaggaggccatgaaggcgcttgccctggaggcggtgccggaggccggcgttttatga

SEQ ID NO: 14 - DNA, 2046 bp, Chlamydomonas reinhardtii
atgtcggccaatcgtcgcagcactaatagtaattctgcatctggggcgcggaacggtgctcgaacgagcagctccgcggacaatgtgaagaagtgggtcgcggaggacactcgagaggagggcaaggctgtttttaaagcacacgtcaaggagacaagcaacttggatgttctatctcggtgcaagaagctcaacgagcttttaagcagcgtaagtctctgggcatgccggtttgggccgctgcctctcgctgcgttcccacggtgctccaatgcgcgtggcgggcctggaaataggtactcacaagcgtggccgctcagtaccaggtgttcttgttgacagcatagtgaaaaccccgaaccaacccaggcccttgtccgcgtccccgcgcccacaggacgtgctcaaaggcaaaggggactccaaggagcagctgaaggagattctgggcattttgcactcgggaccaaagcggccctcctttctggacaaaccgccggtgacggcaactgcaggcaagcggccggtgccggcgcaagcagcgcagcctgttgcagcagggccttctggacaccttgatgcggatgcgctgatgcggctgttggactcggaggacgcggaccaggcggcgaggtaaggaatgccttgtgtgcaacagtgcgtgggagctcatacccgtacttgggagctcatacccgtacttgcgcctcgcgcgggcggcgtgctctgcgcggccatgctcttggcaagccggtaactgtgatgtcatgtgaacggtgtggccttgcgcagggcgagcccaccttccacctcgcgcaccggacaacctcaaacggcggggccgccagcagaggacgttgacgacctcatcaacctgctcaatgacgcctcgccggcacccggcaacggcgcattgccggtgcagcaaaagcagcagcgggagcgggaggaggccgagcggcagcggagaataaaggaggcgcaggaggaggcggagcggcaccgcaaagccaaggaggaggcggagcggcagtggaaagtgcaggaagaggcagagcgccagcgaaaagcactggaggacgaggctaaggctgaggcgcagcgcatggatcggatgcggcggggcgcagcggtgtgcatccaagctgcctggcgtgggcactgcgctcgccgcctagcagcggtacggaggaagcagcgcgctgaacagcgggcggcagaggtgcttcaagcggcctggcgagcacggggcgctgcgcgggagcatcgtgcgcgccttgccgcggcggcggcgctgcaggcggctgtgcgggcgtggcaggcgcgacgggcgctgcagcggctgcgcgtgcaggagttccggcggcagcacgcggcgcggcttatccagcgggcgtaccgctactaccgctacacacgcggatacacgttggggccgctgagggtgccgccgcagggtggcccgcggcccggctccggatcgggtgtggacggcgcggccttgctggcgaagcagctgcggctgcgcagcgcggtggacgcacggctagcgcccgagacgccacaacaagcgcagggtaagtttacctttgctctggcgtgttagggtacggtatagcttacagttctctatgcggactcctggccgcctgaatggccgttttgactttcttcctgccatgttcttgctccatttcgcattcccgcacatccagccatcgtgcacgcacccaaacttactactctgccgccctgcgacctctgcctctgcggcaacgttaacaggggacgacgatgcctcgcagcaccgcacagtggccacgcaccgtgagcgcgtgcggcaggtgagcgccaacgagcgcagccgccgcgccgatctcggagagcgggcagtcatggcggggtctagccaccgcgacgaggtggaagccatggccatagcacgcacgggtatggtttctggaccgccgccctcaggacccggcagccagctgccgcccacgcaacgtgtgtcgtgcggcggtgacggcggagggcggccgttga

SEQ ID NO: 15 - DNA, 1942 bp, Chlamydomonas reinhardtii
atgccgctagtatatgtaagcgtatgccagggctctgtggcgctcgcggagtatgcgggtgagagaagcattcggtcgcgaagcgtgtgcgggagcttcgcgagcgacgctgcgctaggagcacctttttggtcgacaaaacaagttagcgctgagcaacgggttggggctgtcgcgggctgggatgctgcggaagctgcgtgggtgccgtagaaccaggcggcacgcaggcacccctgcgtacgcgccctgctcccctgtcgaacccccatgtagcccggcgccccctacgtaccggtctatgtaatatccgtggcgttggacttctctgtattccattgcagctgccggatcaggcgcataccacatcgcaaccccgctacgatgccttgtccaaactgccacatagcacgctccgcaatttgtagatagcaagcctaggcagcatccctacagtgggccccggagaccgcaaacatgcaaccaaacacgtcatgcattgcgcctgcgctcacgcctacccagaactattgcagcactacaccaacctacgcggacttacggtatcatgtccatcctgcaaggtgccacacgcccgacacacccacacggccacatagccctgtattcctgcgcgccacgcgccgtgacgtagccttactgcgcctcactctcttgacggcatctttatcacaactcaggcttccaaggcaactttgcggtggttgctcgcgattatctggacaaagccaccaagctggagggcaagagccgatacgaggttgatggccactccctgaacttcctcaatcgcggcggattcagtgagtctaagcctcatgcgcaaccgatgaatctctgattgatggcagcagcactcagtgagcactcagtgagcactcactgggcactgatctccatctcatgccctcctctccctcccctccatcccacctctcctctcccaccccaacccaccgctgccgctccctctcccccagcctatctggtgatagccagtgtggacagcggcgtggcgctgccctccgccttcctggacaaagtggaggcagagttccgggccaagtacggcgccgggctgcagctgggcgcggcggccggctcgctgaacgccacattcggcaagcagcttaagcagttgacggagaacgccacgcagcacccggaggagttctccaaggtcgcggccgtgcaaaagaaggtgcggggggagctgcagagtgcagactggtgcaagcccagggctgttacgcctgcgccggctacggcatgtggccctatgccttatcaccatatgcataacgacccacagcgaccatcactttacacttaaaatggctgtctattggcttcttcggtggttctatctgtgtgcgtgtgcctgcaggttgacgaggcgaaggcggtcatggttgacaacatcgacgcggttttgaagcgcggcgagaagctggagcagatacaggagaagaccgaggacctcatggcggaggtgcgggcaagatttgtgcatgtgtaacaggttgggaaacttccatatgggctgcgtggatgtgtggatgtgcgtgcgtgtcagggagggagggagggctcccgcgtgcggaacagcggaagggcgccgcgcgtaagccagagccgctgtggatgagtgtggacagagcggcatccttctggccgttgcgccgcaccacactgctctggccgccgtgtcacgtgtgaccctgcaatcaacaagccctcgcccgacccaaatgaccgcgcgccacaggccgaccgcttccgcgacggcgcggtgcgcgtgaagcggaagctgtggtggcagaactgcaagatgaagatcgtggtggcccttgcggtcatcctgctggcggtggtcatcttcctgctggtctgcttctcgggcggcaactgcctcaagtga

SEQ ID NO: 16 - DNA, 1202 bp, Chlamydomonas reinhardtii
atgataagatttgttcactgggtgagtgagccggagcagaactgaggggaagggggcacgcgttttccaggtcacgcctgtcaaccgaccggcacgaggttgtgaccttgtgtgcaagttctcccaatcttacaggttcgcaccaacggcggctggcgcttcttcgtgcgcctcttgttccagggctaccagggcggggccgctggcgtgggcccgttcaggtggcagtggggcccagcagcgggacagcaggcgggtcagcagggtgctgggcgacccggcgccagtcgccgccgcgtgacactggaggaggttgcagacgcgctagctaagctgcccacggaggcatacatgacgccgcagcagatggcggcactgtccgtgcacgagcttaaggtgggctggtgtgcaaggcctgcgagggacacgcacgtgctgggggcacttgtgcttagggcgcgtgcttgagaatgggctgtcccaatatggtcagccgcgtgtagctgagtaaggtcgcaggcgatggcgtacacgccaccaaacgtggcttctgctacgcctgacccaacgccctggcattgcaggcgctgctgcacggccgcggcctggagccggtcaagtgcctggagaagggcgagctggtgcggcagctgctggagcacggcggcagcagcgccgactcgtgcagcatatgctgcgaggagtatgcccagcaggcgtcaggagccgctgctgagacggcgcagatgccagcggcaggaggagcggccgcagcaggagcaggcgcaggagcagtagaggcggcggcggagctggggcatggaggcgccggatcaactgagtgggtgacggacgtggcggagcggaatgaggctggggccgaggaccatagagcgtccgtggctagcgcggcaggggcagaggctgggcccgcgtcccactgcggcgcgggcggtggtggcgccagcgctggcgagcacgccgtcccagccaatagcggctgccgagccactgggggcatcgcatctgatgctgcagcggaggcggaggacgacgcgcctgttgtgctgcgcgtgctgcggtgtgggcaccgtttccacgtggagtgcgtggacaagtggttcctcagtgccactgactacacgagggaaccggcatgcccgctgtgcaatgcaccgctcatccttcctctccggcaatag

SEQ ID NO: 17 - DNA, 2477 bp, Chlamydomonas reinhardtii
atggcgcgattgcaagcaagctttgaagccggagcgagccgcaggtagataatttggcgctcaccacgggggcagctctaatgtgtgcacgctgttaggaagaacgaaaatgacgcaggataaccggccgcgacgggttgtagggggcgcaaagccccgccgcaacttgggcccgggtgttgcgtggacgcgagtcggcccttacgcgtcccctgccaccccttacacgcagcggcgcgctggctagcacttcccagcgacttgttcgcagtcctgtactcacagcagaagcaccagcaggagcgcgcttggcactcagggcgcttgcctgcggcccgagcacccacatctgcccgcggctgctggcagcccacagcgctgcggcctgcggcgcctgctccccaacccgcagctgcacacacgccgcggcagagccgctaggccagacccgcaccagcggcctcaggtgtgctgtagtagctagcgcgcagcggcgaggcggcggcggcggccggggcagcaagtgggacagtgatgaggagctggaggaggacctgggcggcctgcgcttctccaagcgcagcggcatgtggcggctgcagtacaacaagtacggggcagaggtcagtgaggagcagtagcggcaggcggtagcggccagcggtagcggcaggtggcggggagtgtcggcacggacttcactgacgcctgggctggaaggagatttgactgccccagagccagctgggcgacggcacgcaaccagccaccagctgccgcagtccatctcccagctctcaaccacttcccctacccaccattccctgtggtcccatgatgctgtgctcctgccgggccctgaacactcctgtgtcactcgggcgccgcaggtccgcgaggacgaggcgtggaagctggcgctgccgctgctgggcggcctggtgctggccaccacactcataggtcaggcccggagtgtgtgtgactgtgtgtgtgtgggggggggatagttcattccaatcctggggaccgtgcagtaggggagcctgatgagcaggaagcgcgtgaggggcggaggggcagcagccggcggcggtgtggcgccctggcgcgcacatatggcgctggctggcgagaagggggtgtcggcgccgctacagctgcacgtcgccaaccggagcacccccgcaagcacacccacacagcacaccccagaggcacccgcactcgagtgaacgccaccgcaccctcccgcaccctctcgcccgctcccgccccgctcccgcccctcaggcccgctcatcatcggcgtggccttcacggcggtggctgtgggcgcggcgctgtccgcgggcgcgctgttcacctcgctgttcctgcccttcttcctgctcatcggctttggcgcgctgttctggggcggcgtcaccttctccgccttcgccacgctgggcgccgcgctcatcatcaagccgctcatgtcgctggtgggtgggaggggcggtgggctgtggataggggctgtgattggggctgtgattgaggctgtggggtggggctgtggggtgggaaacaagatttgggtagtcgattgcaagcacttgcgatgccctaagggcctgcctcttgtgtcccttactgcgtgtgttaggcgcaatgcatttgggaactgaaactgtaccgctagcgtgtggcatcactgacagtctgtctcatcgggctgtggtgatgcagatggtggccggtgcgggtctgggcatgggtgccctggctgtgggcgccttcctcaagcccgcgtccagccgggccaaaggtgggtctggcgccgacacaggaacaccaacctatgctccgctgcagtccacttgcacccgcgctatggctgtgcctccgaccctgtgttgcatagcacatgtttcaaggcacatagaggggaaccgcgcacgccaggacactgtgttattatgccatgcggttcgactcgagtccagggcaagtggatggtcgccatgacgtgtgctgtgcgcctcaacccgggtgccgtgtgtgcagcgagctatgaggagaaggctgcggcggccaagtccggggccaagcagcagggcgatgtgatcgaggtggagccggaggtggaccccgaggtggacaggtgggaggggatgaagtggatggagcgggtggggccgtgcgggcgggacctgtgggaaaggcgtacgctcacgctttttggcgggggcgcggcgtagcgacgcctaacaacccccaggcaatggtacgggggccctggaagcagcgtgcgtggatggcggtcgtggtcaacaaccctggggggagatgaggacttgccggcctaagagttcctggctccttctgtccccgtccggaccctcaggcagctgcgcgagtttgacgagctgctgatggatcgggagcagcagcgccgcaagaccgaccgcttccggcagggcggccgctga

SEQ ID NO: 18 - DNA, 14274 bp, Chlamydomonas reinhardtii
atgccccagctgacacgcgcacggcctgctgctcacgtaggcaatacgaacgacggttcgcaacaggcagccggggcggctggcgcagccgcggccggtgccccagaccccaacgaccccgacgcagcggcggcacagctgggcccctccgcgtctcgcgcgggatctcaggcggggtcacagggcggggcgccgggggccggcacggagggcggtgccggcgcagcccccggcgcgggcggtcagcctcagggtccgggcatcatgcagaaggaggagcgggacgcactgcaggtggccatggtgtcctacgacaacagctacaaggtgcgtgcattattgctgtgaggtcgctcgtgtttgtgttggtaggataggcaggatggggcaggatggcgccgtcgggcgcaggcgaggccgtgcgtgggcacgcacggactgtgaacaggtatgcatgctagcgggggagcttgggtccaccgcccaagagaccacgcacatgtttaccctgcgccctcccaccaccccaccctgctccttgacacgtaaacagctacaagaggaggcgccggccgtcaccgccgccatcatcctgcacttcgacaccggccgcatcacgggcgcgccggcgccgctgccgtctcgcctgacggcgcagcacgagggccgcttcgctcgtgaggagctgggtctgtaccgggagaaccagtgcgtgctcagcgaaaactccctcaacaagacggagcagcgcatagccaaggcggccacactggacaggcgagcagcggagcagcgggcggaaggggggacgaagagggggcggaagagatgcgatcagatgggggtgggtggtcggggcgggcggaagcggccgcagagcgagtttagggggagggaaggttacgatgcatgcccgctgcagcctgcttgtgtgctctagtacacacatattgatggtacccaaccctgtcttatcctctcgttgctagggccttgctggcggagatggctggcggcaacgcggctgcgggcgggcagcaggtggccatcatggctcagcggcaggcggtgcgggcgcaggaggtgcagacgcagcagctgcaggtgggcgcactccccacactcacggaggagccggaggggcaggaggggcagctggcgcagccgccactgggggagcagccgcagcagtctccgctgccaccgggcgctggctcacctccgcacgggcagcagctgcagccggggcaacagccgcccatgacgccaggaggacccacgctcccgatgccgcctgggcccggtggctcgcctcccatcatggcggcggcgcagctgccgttgtcgcccggggccgaggcggcggccattgccgcagccggcggcgccctcacgcccgagcagcaggcggcgatgcagctgcaccaccagcagcaacagcagttggcggcgcagggcattctgccgcctggcgcgcagggcgacccggctgcaatggcggcgatgatggcggcaggaggtggcggcggcggcgttgatcccatggcgatggccgtggcggctgctgctgcgggcgctccggccaccaccgccattcaggacccgctgtttgcataccagtggctggatgagaacggcctgatggtgtacgtgcctgaccctaccaaggcgagtgaggcattgggggggatatccgcctgagccgactggggtggaacagggttgaatgtgaagaggattggagctgggatgtttccattactagcgttatgccagcctctgatgcctgcttcgcttaattccgctgcttcccgccttccccgccttcccgccctccttgccaccccccacccccccagcgcgacaaggagcgacccgcccggcgctatgaccaggacaaggagatgacgcggacgtatgtgcggcggccggtggtggacgcggtggctggcgcgggcggtcgtggcggtcgcggcgagtcgcggctgtaccggctggacatcgagctggggcggctggagttcggggtgcaccccgccatgagccaggaggacctgctggtgagaggggggaggagaaaagggctggcggggggtgggtagtttatttcagaacccaaagcaagctgaccggggtaatttgtcccaagccttagcggccccaggggtttgatgatacaatacccagtaggggaggtatgcccgggcctcagtggtaggtcccagagggacaggagggcaggaaggtgcaatagggacgagagagccaagatggcggcaggggggcaggcgtgatggccaagagttgaaatggcgaggggggcgcgacgggatggtgtgaggagacagggtgggaaaggcaggtctacctgtgcctgtgttgaccgcggtgtgtggggctgcgatccgaggtatatactactaaatgcccggtcacaaaccttccatggtttctcgcccaggctgcccggctgatggccctgttccgcgagtacaagaagcgcgaggcggtggggctggtgctgttctacgccggccgcctggccgcgctggaggacagcctgctgggcgcgcgcgagaagctgtttgcgctgcaggccacggaggcggccgctgacgatgtgctggacgcatacgcactgctgggcaagattgagcgggaggtgggtgcgctcgaggggggcgctggggtgggagcggggttgtggataccagcccaaacttaaccaagggaaaccgggggaaggggtgacgagtaccatacgagaactggtgggctgaactgcttgatggcggggctcgctatctcctgtaacgcacggctgccggcaaccactgggggccgctggggccgctggggccgcgcaggttgcggagctgcgtcagctcaaggaggaggaggaggcgctgctgactcgcaccgtgcgagccatggagcgccagttcgaggccctgcgcggcattcggcagcagcagggctacgcgctaacaaacctggagctcacggtgctcacacgcccgccgctggagatgagctggaagcaggtgggcgggaagccaccggcggttgtggtggtggtggtggtggtggtggtggtggtggtggtgggggtggtggtggtgggggttgcggataccagcccagactaagccaaacccgccaaataagcggagcacaggcattgggcgacagatgcaggcgatagtacttaggggagggggccgaggcgtcttgggggcagggaaaggcaggcatgggctggcgcaggtcacacagcacgcgccgtggcgcgccgacggcttcgttgcatggagaagggcgccaagttgtaaggttcggtaataggggcgtgcacacgcgccctaaccaaccggccaatgccttgtgcagggcgtgctgacccgtgagcggctggacgtgctgctggtgacggcggagctggaggacattgcgggcctgcctcgcttcccggaccccctgcccgtgcccgacctggcagacttgcccctgccccgagtcaacgccgccgggctccccgccgccgccgggggcggctttcccggcgccttttcgggcgccccgggccccttcggggcgcccctggcgggctatggggcgctgatgtcgggtgggcagtcggctgcggctgcggccatggcggcgggggagggctacacgttccggctccggcgagtggagtccatgtgcgccgcgcacagcgcgctgctggcggaggcggtggcgcggctggatgcactcaaggtgagggcacggacccgtgtgtgtgtgtgtgtgtgtgtgtgtgtgtgtgtgtgtgtgtgtgtgtgtgtgtgtgtgtgtatgtgagcgggcgccggcgggtggagagtgcagggcgggcgctaccgtgcaccgcacctgccacccactgtctccctctgcgcccccacacctccgcccctgcccctccgcatcactctcccaccacgccctccgcctctacccggcgcagaaccgcccctccgccgaccccgaggacccggtgctcaaggcgctggaggaccaggtggcgctgctggggcgggcgccgcggcgtgtggccatgatggcagaggacagcctggagctgcagcgccgagccaccgagatggtcaaggcggggcaggtgggtgggcgggcgggcggggttgtttacaccatacctcgagaaagcaaactctgcccaccctcttctggccactgcccaccggctgctcaccccttccgccctctgcctggggtggtgatgtttaggcagagcgtggggccagtgggtgaagtggccagggagtggtcatggtacggcatgtgggagggccgaaaaggggggaggccgaacagctgtgagggcagagacctgcaccacacggcacaagcggggctgtaggggctgtaggggttgtaggggttgtaggggttgtaggggttgtaggggttgtaggggttgtaggggcagccagctagctcacctgtcgctgggcctttacccctgcccctgtcccctgttccctttccctgcaggtgcacgtgagccgtctgccgcacctggtgccggtgctcaccatcaaccccaccggcgctgcaggggggcacctgccgcccgcagcccagcagcagctggcgtacatgcagctgcagcagcaggggcagcagcaggggcagcagatggtcatgacgccgcaggggctgatgccggcgccggggcagcagcagcagcagctgggcccggggcagcagctgccgggagccgggccgcaggggcagcacatgggcgggccgatgggcaatcagcccaagacggtggggaaacagggcagcaagggcaggtgcgtgcgggtcggggcaggccggggtcgtgggttatggacagatgtccgttgcggcaacgcccgcgccgcgccaaccccctcagtatatggtatctcacaacctcaccgtcgcacttgtgcaggtactacgtgaagctgttcgtgaaccacaagttcgtggaccagtcggatgtggccacactggccgagaacttctcgggcgacttcaaggacctgttcaggtggggaccggtgcggaggaggaaagggagggagggagcaagaagcaggaggcgggtgggggctgggctggctgcttgcctgcaagccatgcgcggccaggagtggctaccctcctgctgccccccttctgctgcccccgggcgacgtttccttcactcttgggacctattttgctcgggcacattaacctcccccccccacacgaatacacatgcgcagcgtgcaagtgagccacttccccgagtccatcctggtgcagctgtatgagcgacacgcgctgagggactacttcgtggctcaggtggggcgtggcgagcgggccatttgtgggtgcggtcgtgtgttgcaggaacaaccgcgggttgcgggtttgggttttgggtttcgggggtgaggcgtgctctgtccggggcgtttggcggcaaggctggaccccatctcagccggatcgcgccaaactgctgtcccattccacccaaccctgacccgctccactcccacccccaccccaacccccaccccgcgcaggtatacgtggcggtgccgggcgtgtccggcacgccacacgtggacgccacgccgcgcccctaccagttcacctcgctcaccgctttccgcacccgcggccccaacaccagcaaccccaacggcggcggcctgtccggcgccatgccgctcatgccctccgacaccggccggcccgacggcgcgcccggcgccttcgccaccgtgttccccgccggcacgctgtacgtgcggtgcggctgggtgtcgcagcgggtggcggcgggcgcgagcctggaggagagggtggtgcccaaggccatgaccacgtacgacaacccgctggcggaccgggggcgggaggaggggccgctgggcacgtgggcggggcagccgggcagcggcgtggtgggcgcgccggacattgagagcgggcgcagcctcatgccgccgctgccgtccgtgcccgtggaccgcatgctgcgccgcgccgcggagcgcatcggcggcaaggtgggcccgaggagtgtgtgttgggggtgaggccagcgtagcgttgatggctgcttagatactgcacaggtactatcaggagttgggcactgcgacgcctttggccgcacctgagaaaggcgccacccgagcaggtgtctctgatttcttactggacattgtgctaccccccccccccccacactctctctcccctccccacctctccctacccctctccccattccctttgtttagtcatgcttgtaactcccctcccctcccctccctttccccctgccctgcctgcccccgcccaggccaaccgcgcccagatcatgcggtggctggcggacaacgtgatcgaccccaacgacccgcgcaacgccccgctgctggagctgctaaagacgcacgaggccgccagcggggcgctgggcgacctgttcaggctggacatattcccagacgtggccatgaaggtgggcagggtgtgtgtgcgcgtgtgtgtgtgtgtgagtgtgagtgtgtgtgtgcgtgtgtgtgtgtgtgtgtgtgtgtgtgtgtgtgtgtgcgtgtgtgtgtgtgtgtgttggggggtggtggtggtggtgggggggtatgtgcccgagcccaacgaaaaggtcccaactgtcaaggaatcctcgctcaacccggaaatgcagtgcgagctcggggcaggggggggggggtctcactggggtggttatgtgtccgagcccaacgaaatgggccccaagggagggaggggggtcactggtggtggtgggggggggcggcggcgtatttgcgaaggcggggatgcatgggggcggccaggctggcgcatgcagcggggggtggagccgccgcatcggcactgtcgttgtcgtacccacagctgcgcctgacacctggcacctggcacctggcacctgcgcctcatgcccccgcccccgctcccgcccccgcccccgctcccgccctcgcccccgctcccgccctcgcccccgctcccgccctggtgccaggacgaccgtgtggcggacaaacgcatgagtgtgctggcgcggcgctggcaggccggcatctaccgcgcccccgacaagaacctgctcaagggtgaggccgcgcccacagggcaacaccaccgcgtgtgcgcgcgggctggcggtcatgatgccagccacccggccctggcacggtcgtggccgtgtagggtcgtggaaaggccgtgcagtggactttccaataccctatcccttgcccgaccacaccgtaccgccctcaccattccgttcccctgcgtcttgcgcctccgcctctcgctgccacattccgtccccatcatcgcttgcaactagcgcctctgcttggtttggcttggtttaggtagttcgggctggtattcacaaccccccccccctgcgctgtcctgccctccccacctccccccctgcccaggcgtgcgctccgtgcccctgcgcgcccccctgacctccgaggagacgtcgcagctggacagccagtacctggaccagctggcgctgctggaggaggcggcggacggcacgcagctggggctggcgcgggtcatgatggcgcggcacgagaaggccatgcaggtgcagatcggtgagtaggcgagagggagagggggttgcggggtagtggcggggttggttgggggtggtaggggtggaggggttggtgggatggggtggggtgatggtgggatgggttgggttgggttgggcgggatgggttggggtggcgagggatgggttgcgtgggtgcgaggggagggggaggggggcggagcgaagcatgccaacagtgcgcatctagtgcgttgaacctgtcggacatgggcggcgggcttctagcacctcactcacatccctccctgcccgccccagccgccgtcctaacttccccgcccccctctcttccctcttcccccctgtctcccaaaggcgctcggctgaccaacgcaatcaaggagcgcgaggagcgcatccgcgccttcgccatccgagtgcgcgccgccgcggcccggctggcgggcggccgaaccatggcccgccgcttccggaccgaggacgtggtgaacgacgcgccgctgccgcagttcaagctggagctgggggccattgcgcagctgctggcgccgcggcggccgctcaagaggtccaagaagctggtgagaagcgggggcgggggcggggggtggtggtggtgctgggttgcttggtagaaggaagcttgagaaaggcgcgcaggggtagggcggagtagagttggggcggtggggaggggatggggccgcttcgcggcgcctggtctgcgggtgcccacgccctcttgtcacgtctcgagctatgcccagcaaccaaaatgccgtgcacctcttgcacgcctgttgcgaccctccacacgcctccacaccccaacatggctccgcaaatcatccttgtgcccccaggtcaagtcgctgatgacgtcggtgccgcgcgagacgcagctcatggtcaccatacagcgcgcagccagcctgcccgcgcgcatggccagatcggccgtgggcggcacagacgacaagcggctgcgacgcggcgcgggcgtggaccggcggagaggcgggcgggcgggcggcgacggcggcgacgagggcggaggcggtggcggcggcctgccgtcgggggcgccggaccggctgtcacagcagcgcaactgctttgtggaggtggggcggcagagtcatgatgagctgctaacgctcgtaagcgctgcgcccaaaacccgtccatcagagctcctcctcctccttctcccgcacctccaccttctcctcctaacccctttttgacgctccttctcccgactccctcgcctctgctcacccctgtttgttgcaggtgcgcttccgcagcctgtcgcagcgcaccatcgccgtgccgggcgagttccccatcttcaacgaggaggtggggcaggggagagcggcgggggcgcggggggggggattgttattaacagcccagactaacccagaaccaacgaaagcgagcggagcacaagcagaggtcttagttgcaagcgataatacttgtgggatgtgggccgaggcgtcgtggagcagcagggcgagcggcgccggcgataaatggggaatggggcagttgacggggtggcgatgcttagagcggtcgcccatgcttgcatgttggtgggctccaagtgggcgcggcccgcctctgtttggtcaggagtgggcacaggtgccgagtgccaacccctcccttctcgttcatcccttgggtgcacttcctgatgcggatggagcactccctccctgccctccctccctccctgccctccctctgccccttccctgctccccatgcctccccccgttgggctcgggcacacaccccctacccccctatcatgcattttaccccccaccccaaccttcagttctccttgccgcgcgactgtttccttacgggataggtccaacgtgaaccccccaccccaccccccaacacacacacacacacacacacagatcgacctggacgtgttccgggacgacggccgcgacacgcagcaggccggccccgaggacggctcggcgctggagccgtcccccagcgcgctgcaggagaactccgacctcatcaccttcaacgtgttcgatgagatcatcgtggagccctcagagccaattacgctgcgcaggaggtgggcggcgggggtgggcgggcaggcggcgatgggctcgagggggcgaggggcgattgccactcagccgctgtcacccgcatgccctgtcaccccacgctgttgccagcctcttggtgtgctgtccctaacctgtgctccctattatctgtgctgcccctcagtcggttccatgtttaaaacaagccagtcgcgtgaacggctacacctccctgcccccacctcgcacctcacccctccacgcagggacgcggagatcagcgacccggtgcgtctgccggagcgcgagcggcgcttcctgggctgcgtgcgggtgccgctgagcgccgtgtaccagatgcaggtgctggagggcaccttcaagctggaggcgccgccagtggtgctgggatacgtgcaggtgcgagggccgtggggggggggccggcctaggaagcagctggctggcagagatgtacgtgtgtgtcagagaacaaagggaatcaaagcacgccggaccgtgtgtgtgcgtgtttgtgtgggacggggtaacggaggtaacggcggaaggcgcctcgccgctgcaatctgccgtcgcagtcacttcaactccagcccctcgttctccccacgcctcctccccttctgcctgtgcccccacagaccagccagcggcccagcaccgtcagcatctacatgacgctgcggccgcggctggccgcccccgccggtgagatggacgagcgcatcacctcgggcgagcaagagcaggtcaaccggcacgcacaacggtggcgggcggcgctgctggggcgggccgagtgccgctcgcgagtcatcaaggtgtggcggcggggacagctgggaggaggggaagaggggagggcggagtcggtccagggagggatcctggcaacgctatatgacgggtggtgtggggggtaacttgctgatgcatgcgtgtgatttcatacacgtgcatctcatccgtgtccctgtccttcgcaacacggcgttcctcctctgcccatttccttgtggtcccaggtgatggctgtagacgcagacggcgcggcggtgctggtgtgccgctacgtggcgcccacactgctgccgccctcgctggccgtgaacgtggcggcgggcggcgcggcggtggcggcgggcggggtggagatgctcatgctcaagctggccagattcgtggcgcacgtgagtgccgtacgtgtgtatgcatgcgtaccgtatgcgtgtggtcgcgttgaggttgtcacggacacgtgcacccacacgcctcgcacacaacttggccatgccaggtactcccgtgttgcgctgcgtcacgctactccctgcctccccggatcgttgggctggggcaagtgcccgtgttccctcaccttcctagcccccgccctccttcagcctccttactagcctcctccacccccgcctccgcccccctcctgctatactaacgtccctggctacgccttcacttcttcaatgatgatgattgtaaacccgctcccctcccccgccccccaaccccaggtgccgtacatggaggacagcggcctgcacaagcggcgcaacgacatctggaccagcagcagcgagctgctgcacctggcgggcggcgacttcgaggagcacgcccacctgctggcgggctacttcctgcagctggggctgcaggtgggtgggcggctgcaaggagggctggggggggggggggtggaaggccgggcggaaggaggggtggagggaggggtgcagggaggggtggagggaggggcggagggaggggcggagggaggcgtggaggtgagatggcgcgcagggagcgaggtggcgtagggacggcggcagggtgggcgtgggggtggaaaggagtgccgaggcagccaccagcacgtcgtgcatgttacgacagcgcctcccccctccccgcctctcagcactcgccggctcccgtcagcgcccgctccgtcctgctcactcgcgcccgtcctgcctgtcccctccccctcccggcgccacacctgccaggcgttcgtggtggccggcacgtcgctgtgcggcgctcgcagcatgttcgtgctcaccaccggccaggccgccgcaccgccggggcagccgcaggcgccgccgccgcccctgcatctgaacgcggagctgctgcggctgtggaaccccatcaccggcagcgtggtgtcggtgaaggaccccaccggggaaatgcgcgaggtggggggagccggggcgcgggtattggtttgcactggggtggggtggctagttggccggcggttgcggccacggtgcatatgacggcaccttgtctgtagggcctctgtgtccttggctcatgcctgccccaccttcgcaactacggtagcgtatgcaacatattagaagaacccacctcgcccacgtacccgcacccccaggtgggccagctgtacgacggctccaacatctgggccaacacgcagcccacggggcggccgtgggagatgaactggaacctcaccagcggccgcgactgggtgcccttcttcggggcacagctgcccccgcgagagatcgccaccatacaggcgagactgcgacgctcatgcgctcgctgccgctatgcgtaatgccggaatgcactggcagggacaaggagcctaggcaagcactgcgcccgccgtgtcaaaacccgcacacgcacactatcccacagacaacgccgctgtacgaggagcttgagaagcagttctatgaggagctggaggggcgcgtggagaaaaaggtggaggaggccctcagccgtaagtcacggcgggcgtgggcgtggggggttgtaaattccagcccaaactaagggcgggggtggcgagcgtgtgaagtggaggaaatcaagatcatgtccgttcacacgtactgaatcccgccctcgcttgccctcccttgccctcccttgttctcacgcgcccacagaggctcgtgccgcgggcgccttcgtgaccaagcccgacaacagggtgtcccgactgctgaagaacctgctgagggagatgcccaaggtgcgtggcgcgcgggaggctgcacagcctggcctgcgcgatgcatggctgcgcggccgtgcttgcgttagcacgtgtggacttgtgcttggcgtggggtgttgacggcgcggcgtacacgcatgcgcgcgtcagcgagtctccgcgctcttgccaccgcccgacgcgccccaacactcgtcctcatgcctcacccgcggcccgcacctcccacagaccagcgaggccatcgcggccgcctctctggccgccagcgcggcgctggcggaggcggcgggcaaggggccgctggaggcgccgcagcacttgggcgagcgacacaacctcatcaccggcctgcaggtgggtggggcagttcttcccggagtaatccaagcatcaccaggaacccagcaacccccccccccaattaatcatgaatgtaaccccccagtccgatccagcccggcctatagagcacagaggaggtagggcgctgttgcacgcggagttggccgggtcgtgggcggcatggcttcgcctgatacgccacatgggaatgatatgcaccgcagccgcccgggcctcgcgctcctcggccctggccacgagtccgtagcagcacgcacgctcacacacgacagttcttcgcttccctgaacacccgcgctatcttccattccgagccgccactgctgctgcgccgcgtcgccggtgccggcctggcccctgctgctcctgctcccgcaggccagccacaacgagcgcatccggcgcgagtccaaggccgaggcggtacacggccacgtgcttgcgctgcccttcagcgactcctacctggaggcggtggcggacgcagtactcaacacgggtgcgcgaggggcggggtgggggttggggctgtaaagaccagcccaaaccaaaccaagccaagccaagtggggggaggttagccgtctgtgaacgactttggtatgaaatcgcatgggcgtatacggtatgcccaagcccaaggataagggggcagggcagcggatcgggcggggcggtaggcggcggacgctgtgcgttgaggggacggtggggagccaagggggacaagtgaaattgaggctgggccgcgctgcacagggagttggctggaggtagcggcgccgagagagtcgcaaggatgtatgactgcacgagcaagcaggggtgctgcatgcctgtggatttcggtcgtgcggcgctacctagctagcttcctcgctcactcaagcatctgtttccctccgtatgctgaccgccgcggcgccgcatgatggcctgcaggcatccaccggattgcggacgagcgggtgaagttcagcaccgccgtgttcgtggagccgctgggcgcgtccttcgtgtgctgcgtctggatctatgtggcggcgattcgctcgtga

SEQ ID NO: 19 - DNA, 4804 bp, Chlamydomonas reinhardtii
atgagctacgggggcacggaggtgcgagtgctagctgaccagcgcattttcggcttccactgcaccggaagggagcctaaaacgctgcatgtcccaccgcaggaggatgacctttatggaggatatgatgagcaatcgaacccgcttgcggtgagctgcttgtggtcacgctatgttatgcgcatgtgtgcaccggtccttaccttgcgcgaccgcgttttgcagggctcgggtggtgccgcatttaaggcacttggggccgatggagctcctccaggcaccggtgggtatcagggcctcgcggttgccgcagcggtcacagcggttgcttccttggttgcttcgctggggcaagtgggcacggcctcactgcttcgggctgctgatccggaaccttctcccacacgctgcagccatgatggggccgcctggcacggccatgaagagcttcgtgccaggcacggctatgcggggcggcacggcgatgcagcaggaccccagcctggcgcggcctatgacctcgaaccggggtgctggcttcacgtcggcgcctaacaagaagtttgaccccctcaatcgctcaatggggtcgacactgggctcgtcggggggtggcgcaatgctggtggctcgcaagggtgacaccagcccggaggagcaggcgcgcgggatggagaagacggtgcatgagctgcttgagaagagcgcggcggacgcggctaagaatgacatcaactcgggtgaggcgattggcagctgtccaggcgttgcagggcgttgggccgtgtggacgggcagccaaatgagatgggtgtgtgctgcggtgctgggcgcgaccagcatacaaagaggagtgctgctgcggaacacgtacggccgcagcccgtggtttggcaaaaccagacgacagccctggtgcgatcagcggctacggcaggcacgcggtatcggcagtgcattgccgctccgtacggccacgtatccaagcgtttgcggcgcggcattcggaccaaattgttgcgcatttgcacccctaggcaaagcagcggcacgacttgttgtggcggaaggtgcacatgcggagatggcgatgagtcggcacctggtggcggcgcacttagtgttacggtactcttcaaccagaaaggtctgacctggatccgccggcctgtctgttgcatctcgcccaaccccccgcagccctggagaacgccatggaggcgaagaagaatgagcgaaagctgtgccgcttccgggaacagaacaacatggcggaccaggtgcgtgtgcagccatctagtgcactgcatggctttacgctctgcggcaaccgagtcctgcgcgctgcagcgcagacacttgagattgctgtgcgcgctgcccggctgcatgcaccttaggcaagcccacgcacccttaactctgcccgtgccgcctgcaaccgcaaccttatttaacctctttgatttcgcttctcaaccacacagatcaacctggagctgatgtacgccgtggacttcaacctggcacacatgtaccacatgaacaagaactacagcgaggcgctgaacctgtacacaggtacgtttggtgcgtgtggggcgccgtgagggtggcggcgccgggcgcaagaatggatatctgctgggtctctgtccacatgcccacacgcttgctgatggccccacctctcaacctgcaacccctgcgcagccatcgtgcgcaacaagaacttcccgcagtcgggttggctgcgcgtcaacatgggcaacatccacttcgagcagaagaagtacccctccgccatcaagatgtaccgcatggcgttggaccagatcagcgccaccgccaaggaggtccgcttcaagatcatgcgcaacatcgggctgtcgttcgtgcgcatgggccagtaccccgacgcgctgcagtccttcgccacggtcatggacaacgtgcccgaccaccagaccggctacaacctggtcatgtgcaactacgcgctgagcgaccgcgagggcatgaagaacgccttcatcaagctgctcaaggtgcgtgcgtttgcatgtgtgtttgcgtttgccttggcggttggggcggaatgggcgcggtttgagtgcggatgcaaggctcacgtgcacgtatgtcacatacggtatgtgtgcctacgtcgcacgagtcacgcatggccacgcgcacctgccgccgtgtgttgattcgtgttgtgcgacacgcggcgcaggtgagcccacccagcgagatggatgacgatgacgacgacgaccccatgggcgatgacgacatgcaagtgatgaccatggatgacgggctgaaggacgagatgcgcaagcgcaacaccatcatcacgcgcctcattgtcaaggccgcgcagctcatctccgagaaggtaggagggttgcagcacggtaaatcacacagcgaggctatgcgggctgtgtaccttgagtgcacgtgagcttgcggctgccggcacagtatgccctctcattcctctcatccccgaggcctcctgccgccgcttcacaggtggatcgcgccaacggctttgagggcggcttcatgtggtgctgcgagcagctgcgcgacgcgggctacaccaagctggccaacgaggtggagctggccaaggcgacccggttcatggggcaaaagcagtttgacaaagccgtgggcgtgttcaaggtgagggagggagggagggagggagggagggagggagggagggagggagggagggagggagggagggaggaagggagggagggagggagggagggagggagggagggagggagggagggagggagggagggagggagggacgtcgtgaggcaaggtggaagcaatagggggtcgcacctgcagcacacttcagcgattgagaacagatagtgtcatggatatgtggcctcatggccgcattgcacacgactgtgccacccgtctcgccccttccccaccagccgtgcccttccctaatcaccacccgcccgcctcgcctcgcctcaccccacaggactttgagaagaaggagccgcgcgtcaaggcgcgcgccgccaccaacctggcgttcctgtacttcctggagggcgagaccgaccaggccgacaagtacagcgagatggcgctcaagagcgaccgctacaacgcacgagcctacgtcaacaagggatgcgtgctggtggagcgcggcgatctggagggagcgcgaagcctgttcaacgaggtgaggactgaggaaggcctaagccgggctgtcactaaccgggtggaggcttgacatgagctgctgaccagtgcactgccttactacgtcaagtgtcggcccagagctgatgcaaccgctgcattgtttcactcgctcgattatcacttcagtcactgactccctcaatcgcacacacgtcatgtgtttcaggctgccggcatcgacccctactgcgtggaggccatctacaacctgggcctggtgagccagcgcctgaacgagctgccgtacgcgctggcggcgttcaagaagctgcacaacatggtgcccgacaacgtggaggtcatccaccaggtgcgtgcagcattcggccgctggggcgcttgaaggcgcactcctgggcagtgcgcgcgctgcaccacccgcatcaactctatcctcttgcatgcagcaccctaccccggcggcactgacgcgctgtaaccctgcctgcccccgcaaaccgcgtgtcgccccgcagatcgccaccacgtacgacatgatgggcgacttcaagaacgcggtcaagtggtttgagctgctcacctcgctggtcagcaacgaccccggcgtgctggcgcgactgggagccatccacgccaggtgggtcacggccaggcatcgccgcggggacggggccactggccggtgccagcctacatgctggcgtgcatgctggcgcgccaaccgcacactggcaaaagcagcgcataccgtacgtgcgcgccgagtgccggcgcctctccgcctccttttcacctcgctttcggcctcctctgtcctcgccacttcctccacgcaccgccgcgcaggttcgacgacgaggccaaggcgctgcactactaccaggagtcgcaccgcgtgtacccggtgaacatggacgtcatctcctggctgggcgcctaccatgtcaaatcggaggtgtacgagaaggccatgcccttctttgacctggcctccaagatccagccgcaggaggtcaagtgggcgctcatggtggcgtcctgctaccgccgcaccaacaacctgcccgccgcgctgggcaagtacaagcaaatccacacgcagcaccccgacaacgttgagtgcctgcgctacctggtgcacctgtgctccgagctgggccgccgcgccgaggccgccgagtacatgaccaagctcaaaaaggcggagaaggtgcgcggggcggtggaggcagaggatggcggggggttgcgggttggagccttgcaggccttgggctgttgcgcccgctgcggttactcctgtactcgtgcttacttgttgctgctccacgtgtttcgatctccccaggcggcggtgcccgaggcaacgacagcggcggcgcccgccgcggccgcagctggcagtggcatgggtggcatgggcggcctggacgacgacattggcagcagcgcggtgtcggcgcagaaccgcggcaagaagatgctggtcaaagagcacatgggtggcggcggtggcaaggacaacgacgactggggaaacgagcagcttggggacgacctgctgcccatgtaa

SEQ ID NO: 20 - DNA, 20404 bp, Chlamydomonas reinhardtii
atgagggtgaatgccggcgacggcagagctgccgccccgatcccggagaaaacggtgctcttgaagggcccactccaggaccgggtgatagcatggtcgctcgacgccatcgaaaacggcgaggcatggcaaaaacaggttagttaatgggtccaggcaggggcttgcgaacggatgctgacatgaccggcggcgaagcacatcggccccgcgcgcgatgccatgcatgccacgaagccttgcctcgttgcttgacccccgcccgaccgccggccccgcctcgcagctccagccgctccccgacacctttgagacggcggaggagtgggccggcctgctgcagccctttttgctgctggagatgcaggcggggctgcggcaggcgctggagcagctgggctccgccaagtggctgccgctggacggcgtgccggagctgcgacgagataacgaccaacgcggcggcggcggcggtttgattggcggcgaggaagatggcttgggcggcttcgcgccgccgactttatgcaaggccactgtcaacttcaccgtgcgcgggcaggaccgaagcggcgccggagcaggcgactggcgcgccgcgcgtgccgccaccgcggcggcggcggcttcacaagcgggaggtggcggctgggtgcacaagaagccgccgccactcaagcccactgacatcgtattgctggtcaacgcccgggtgagtgacgagttcattgggcggcggtagctagctaggtggaaggttcccatccagtacatgtctgttgacacggcgttgcctggcttagtcataacgagcgcatgcatggagctactacacacagctaataacgaacacaccgccgcgcgccttgccctacttccgtgtgttatcctggtttcctcatgtgtcaggtaccggacctggcttcgctccggcgcagcgacgtgctgtgggtgctgggcgtggtgcagcggtcgcaacgcggcatcgtgggggacgccgaggacgaggaggacggaggcggcggtttcttccgcgcggcggtgcatgtggccgcgggcagcagactggaggcggcactgggtgagtcacggcagcttactgctactgctgcgtgtgtgttttatgtgtgctcacacagttgacgtgtgagcacacataaagcgcgggagccggtagcacgcacagcagccatacatagcataccatgccgccccgtcctgctgccatcctgcggcctgccgtcgccgcccctgccgtcgcccctgccactgccgctgtccctgccaatacctgttgttgtgtttgtgctgtcgcagccggcggaggcgccgccgcgtctggcggcggcttggcggctgcggcgcgggagtggtacgcggtgccggtgggcagcatcgccacagacgagcgcgtgtggaatgcgcttctcttcctgggcccgctcccggtggcaggcagcggcactgccctgtcgcgtctgttgccgccaccgccgcagccatgcatgctgcagctactgctcggcgacggcaggagcagcagtagcagcagcgccggcgctggcttcggtggaggcagtagcactgtctacgtggaatccatccgtgccgctgctcggcactacgcgagcaccgtgcggcggctcaatccctcgcagcaggacgcggtcgtgcgtgcggctgtggccttggcggcccgttccccagccaatgccattgccaatgttgaagacgcaggcagcggcagtggcagtagcagctgcggcagtagcggcggcggcggcggccgcgcggagctgcagctggtgcagggtccgccgggcacgggcaagacctccaccacggccgcgcagctgtcggttctggcggcagtggggaggccgggcactgcgctgctggcaactgcgcccaccaacgccgccgtgggcgagacagcctccaggtgcgtgtgcgtgtgtgcgtgcgtgtgcgtgcatgcgtgcgtgtgtgtgtgcgtgtgcttgccgctgagtgtgcgtatgcggattgtgacatgtgccatgtgggatgtcgcctccgcctctcgccccttcctgctgaccgtggcaactccgcatcgttacatatctgcatgcacatacgcatgcgcaaccttgcaggtttgtgaagctggtggcggcgggcggtcagcagtttgcggacagcgaggctgcggcggagctgcgccgccacggtctgcgcgtggagccgccgctcctacccggtgcgtgtgtgcagcgcgtgggcatgggcatcggggtgcgtgtggggggcaagcgggcggggcacatggctggatgctctgtctacctgcacgcaacctgtacgtgcacctctatctccaccctccctcgaaccaattcaatatcgccttcactacatgcggtagcctgtccagcagacggttagctacctgcggctgtccaaccgaaagataacacacattgtaaaacaacgcgccacaggcgacatcgtgctactgggctcgggcgaccgactggacctgaccggcagccccgagctgctggccgtgttcctgcaggccaggtggggtgtggagggatgtggaggggtgtggagggggcaggtggggtgtggaggggtgtggaggggtcaggtggggcgtggagggtgtgtggaggtgtgtggaggtgtgtggagggggcaggtggggttcctgcaggccatgtgggggtggatagggtgtggagggggcaggtgggggtgcctactgctgtactttttggtggaggatgtccctgctgaaggccgcgctgtggtatagctggatgagggcgtgcgagggcagatagattggtgggtggtgatggccgtggatggtcgggctgatggagcactttggcagacagggagcacgggtgcatgtgtgcggttgtctggcgctcatcactaccactcatgccactccataaactacagccaacacaccatgcagatcgcgccgtcacctgtccacccggacccacccatccacacagggccaagcggctgtctgcggcgctggccacctggtccctgacggtactcgacatgcggcggctgctcgcctacccctgccaggtgcatgtggacacattgcgcgcggcggaggcagccaccgccgccgccgccgcaccgggtgcattccgacagccgccgccgccaccgcagccgccgccgccccgaagcgtgggagggtttctcaagcagcggctgccgccgctgctgcgcgagctggcggccgcggccagatgcctactcgcagacctgccgtctgcggcctgggtggcgggcagcagcagcaacaacaacaacaatagcaggggcaacagcactgggatcgccgctgtcggtgggcgtggcgccgccaatggtagcttggcgccggcggccgcatatgccgcgcgagccgacaccatcgtggcgaatcgcgacgcggtgcagggcctggtagacgcgtgcgcccatctggcagcggggctggcggcggcgagcgctgcggaggcgtcacgtgcggctgaggaggtggagcggcgtggcggcgccgctagcggcgccgacacagatgccggcgggcccctcctatcgggctccgccgccctggcgtcctccatgctcgacctgacagccgccatggaacgtgcacgccgcgcactcgcgtcgaatgtgcccatgcccaacgcggcgcgctcgggcggcgggaacatcttcgggtaagtacgtgtgtaccacctcctcatcgtgagatatgcacgcatggcgcaggtatgcagaaacgaggccgcagctactaacgaagccagtggcgcgcacactgtttggcaccagccgcgcaagttcaaagcgcggcccatgcacgccttgccgtatgtaggccttcaaattgtgcacacgggcctagctagcatccgcggcctcttcccatgttgtaaagcaacggccacgctctcctcctcgctctactgcattgggttcggtttagtttgggctggtatctacgacccacccacgcaatcgccaagcaggtactgcctctcaaaggcacgcgccatcttcgccacggtggcggcggtggggtcggcgcgcatggccgccgccccgcccgtggaggcggcggtggtggatgaggccgcccagctgccggaggcgcacctggctgtgccgctggcgctgtgtggcggcgggtcgctggcgctgctggtgctggtgggcgacccccagcagctgcccgccacagtgctgtcgcaggtgagcgctttgttggttgggtggttggttggttggttggttgtgcggggcgtggtgcaagcgcgggacgacgtgtgagacgatgggacgacgggacgacgtgtgatagacgatgggacgatgggacgacgggacgacgtgtgatagacgatgggacgatgggacgacgcgtgagacgatgcaaatccgccggctacttaggtaagacgagatagcatccagctagacggcgtgtaccgacctggaccgaccgcacccttatgctcctgatcttcgctgatgccgctgctgcgccctgcctgcctgcctgcctgcccgcctacccacctcgcaggtggctcaggccaggttgtacggccgcagcgcctttgagcgcctgcagcggtgccaaggctggcccgcggtgagtcaatgaatgcatgtctggatgggttgacagcgctgggcgcacatgcggcgcttgtgggagtgtcaagaccagaattccaactgttgacattcagccatacgggcatcgttagcgctaaggatgcccgtatggctgaatgtcaacacccactgctgcttttcttgtacctgctgctcttcacacgactccacgctgctgatgtctgcatggcctatctacacacgcacccagcctgtcgatctacacccagcctgtcgatctagacccaaccgcacctgcacctgcacacacctgcacccacacctgcacccacacctgcacccacacctgctctccccacctgcacccgcgcacacgcagctgctgctggacacgcagtaccgcatgcacccggccatcagcacctggccgcgggaccgcttctacggcggcagggtgagtgggcgcgcctcggtttttagccggatgctgctttagcaacccattatctcatcatcccaacgatgcaaacatgtgcgtgatgtgcgcgatgcaggtggtggacgggcccaacgtgaccgcccccgcgtacgccggcgtggcgcagctgctggggctggcctgggggcccctggtggtgctggacgtgagcagtggggcggaggagcgggaggcctacaatgacggcactggcgaggaggacgccggcggcggtggtggcggcggcggcggcggcggcaaaggcaccagctggcgcaacccgcacgaggccgcggtggcggcggcggtggtgcggcaggtggcggcagcgtggcgagcgctgcgcagcaacagcaataccgtgagtatgaccggtgctggcgccgcgaccaatggtgctggtggtgtcgcggccgctgcgacggcggaggccctggcgggcctgacggcggcgcgccggtcgctctccatcggcgtcatttcgccgtacaggtgggcggctagggctggcctagaaacgatctaagaagacgagcaacaggggatggtgagtcattcgtttcatgccttcacacgtcgccgcgcccacccattcctgctgcacacacacacacacacacacacacacacacacacacacacacacacacacacacacacacagggcccaggtggacctcatcacctccaagctggagcgactggacatcgaccttgcgttgcaggcggatgcggaggcagaggcacaggcggcggcagaggcgggaggggcggaggcgggcacaggcgggccgccagccgcgccatcaggtggtggcggcgtgtcggtcgcggtgcgctccgtggacgggttccaggtgcgtgtgcgcgtgtgcgcgtgggtgcgtgtgcgcgtgggtgcgtgtgcgcgtgggtgcgtgtgcgcgtgggtgcgtgtgtgcgcgtgaagtactgcaggacttgcacgccgccgcggctgcccgttccctccatgcgctcatgtgctcacttagctggccgcggtgtttgcccccctctgctcgctgcttcaatccgctccacaccatcttctgcatcgacccttcctgtgacacgctgccggctgagcccgtcattgggtcttccatgctgctccacctcaccccagtccaccttcacctcctcacctcttttgtttctgctccacccaccccaccccgccactgctccaccgccattaccaacacaacccaacagggccaggagaaggacgtgatcgtgctgagcctggtgcgcgccaacaccgccggctatgtgggcttcacggacgacgcacgccgcctcaacgtggccgccacacgcgcccgccacggcctggtggtgctggtgcacgccgccacactgcgccaccgcagcgaggtgcgagtagcgcgagtagcgcgtgggctcctgggggacgtgcattgagactgagggtgcgggaggaagagtgggcaggtagacacacacacacacacacacacacacacacacacacacacacacacacacacacacaggcacacacacacaggcacacacatgctacctttttataacacatgctacctatgtggataggtcactttttccgtttcgtcgtccaacacatcttgtgcttgcgtgcagctgctgcgtgcgttcctggaagatgcaaggcagcgcggcgtgctgctgtctgccagcgaccagccgcagatggcgcccgcgttccgggctgtgcaggcggagcagcggcggtgcgccgctatcgtgcgcggcagggcgccgtgggacgaagcgccatggaaggtgcgcatgcatgctaggcccccgtgcccagccgcgccgtgccagcagtctgctggtccttcctgcccatctggctagccccttctatcccgtcgtgccacgcacctgcatgccggcggcacatcaccaatccgcacacaaccgcacaccgtgcccgcacgcaggtgatctacacggaccgctactgcagctcctgcatgcagctgcagcccaaggcgtggcgcgtgcgcatgatcgatgcggtgagcgataccgtacgtagatgagttggatcgagacattggaacgtaagagcgagcgagacggcatgcatgcatgcgaaattaccatacccgatgtgcccacgtgtctgcaagcggaaaccagtgtgtatcggcatatcgctgccgccgcgcaccgccgcgccgtttgaatggttgattgcaagcaccgaccccaccgaccccaccgctggttgccaacgccgccgcccctactcctacccatttatcccatacggtactgcccactcgtcgtaggtgctggagctggcgcacgggcgcttcccgcggcggcaggtgccgctggcggcggtgcggcccgagttggccgccctgctgcgcggccaacggctgcagggcgggcggctggtgctgctgtggtcggtgcggctggagaggcatcagcagcagcccgtgcgccagggcggcagatgggtgcaagcgctgcaggtgcgtatgtcgttgcatgcagttgcatggtgaaaagccaaccagcagccatgaacttaacggccgtgtctcttgtgcgcgcgtggcggcgggtacggttggcggtgctgtgagtgatgctagcgaggtgtgcgcgtctgctaccgttctcttctcacagttgcctcgtcccttccttcttactcccaccgcagctgtgggacgtgctacggctgctgcccgggcaggatgcggagctgggtgcggcggtacgacgggtggaggccgagatggccacctacacagacgaacacctggctgcgttgcggtacgtgggcgcagacgtgtttacgtggctggacggatggggtgttgcatgggataccagcaagcaaccatggggcgatgcatgggttagtagctaagcatgcgcagcctttgcagaaaggtgtgcagcggcacctgaatgctggcctggctagcagtcaagtagcaacctcgctcaagccactagatcgctccatttcacagtcgggctcgctccatttcacaacacccacccgccgtacacctgccgtacatgcacgcacctgcaggctgggcgagccggggcccgacggcctcatccggccgcgcctgatctgcaccgggcccgacctgccctttgcccgcttcgttggggccgcagcagccgcccctggcggggccgccacctctgggacagcagcagcggggcgccacgccggcgtggggccccggggtgcagcagccgcgggcgctggcgacgatgctgacagtgccggtgtggacgcgcagcaggagcagcaagggccggacacgcacagccggctgtacgtgatggatgcgctgcacgcgcggcagctcgccaccagcgaccaggcgggcgcgctggcggcgatgttcaaggttcgcgtttgcgtttgcgttgcgagctgtgaggagtaagggcagcagccgctcggttgcttgggtgtgcgtgcaagtagttgatagcagataggcgcgcgtgcgttgtgctgagtacagagctcacttgctccggtccgcgattgcccgcactcattctgcatgccgggtgccgccctgcagctgacgccggagcaggagcgggtggtgcacgacgaccgctccgtcattgtcatcgggcgcagcggcacgggcaaggcaggtggcaacgcgaccaggggcaccggggcaagcaggggcgtggtgcggcttgtatgcctcggagcgcagacgcacgcacttgcatgacgcgcgcgaggcagacacccgcccttcactgttcacaaggggatgcgaacaccgcgcgcaggggcccccctgccttacctgatgcttgctttcacacctgtgcccccacacgctccacacgcaacacagaccagtgtcatcctgtcgcgggtgctgctttacgaggaggccttcgcgcggctgcacggcggcggtggacgtgatgaggcggagggtgggcagcagcagggcagcagtggcagcagcggcagcagcgcggccgcggccgccggcagcaaggtgcggcagttgatcgtgacgctgagcccccgcctcgcgagctccactgccacctacctgcgcaagtgcacggcccagttccagggcctgcagctggccgcgacagcagccgaagcgctcgatgattcggcagacgctggaggcggcggagcagatgccggcggcgggggcgaggctggcggcgggggcgaggctggcggcgggggcctgctgcagcttagtgacgacacggacgcggcacgcatgtacggcgacatgcccggcagcctggcggaggtgtcggacgccgcctgcccgctggtgctggacctgcgccgcttcctcctcatgctggacgccgggctgcctgacccattcgcggcggcacagcggcgtcgggcggcggcggcggcggcccggcgtcgggcggcaacggcaggtgctggcggtggcagcagggccgcgccggcgccggctcagcaggcgaaggcgccggcggcgcggggtagcgggcagcggtcgcacgaggatgatgatgacgaggacgttcctgacacctgggacgttgacagcgaggacggcgctgttgggctcggtgccgcgggcggcggtctgggtgcggccgtaggtcagcagcagtgcgaggcggcggcggaggcggtggaggtggactatgagcgctttgcggcggcgtactggccgcgattcagtgccgagctgcgcaagggcttcaagtgagtgtgcacttgaaatgaatgcacttgatgatgacagcttgctctgtcaactcgtttcctgtcaagcaccgcatgctgcttgcgcgcaagtgcgggcaaacgcaggccaggccacactgcgtgccaacgaccggaggtttacggccgaagacgtacgacaggagatggcttgattgctgcttggcgatgtgtttgcgctctgccgctgccgccgcagagagccggctctggtgtggcgcgaggtgcagacgcacatcaagggcagcctggctgcggtgctgccggaggcctggggcggcggcggcggccggctgtcgcaggaggcgtatgtgggcatggcggattcacgcgccggcgcgaacctaagcgccgagcagcgcgagtgcatctacaaactgttcaagtgagtacggctgtcaaggaggctgttcaagcgcggcgcctaacctagctgattcttctgctcttgtgcgctttgcgcatcaagcgtcatcaatgccatgataatccacgtacggcggtgtttgctccaaatgcagcttgagggcgcggcagccgcagacctaccttcaaacctcaaactgctaccacatgcttttacacgtgcatacggccggccgttcacatggacaggcagtatgagcggcagaaggaggcgcagggcgagtttgacctgggcgacctcaccgcacacctgcacacggcgcttggcggcggcggcagcaggcgtgcccaggcggcggcggcgctggcggcggcccggcaattccgatttgtgtacgtggacgaggttcaggacctcacgccggcccaggtggcactgttcaagtgggtacggttcacctcagcctcttgcttgctttgggcgctgtggccacgcgttgtggctgtgctgttcccgccatcaaccattatggtgtgtcgcccacccgcccgccccacgcccaacgctccacgcacctgcatacatctcaacacctgtatgcccatgcccatgctccacgcacctgcacgcatcttaatatatatatcggtatgcccatgcccatgcccacgcgacgcaggtacgtgtgcgcccgccccgccgacgggctgctgctggcaggcgacacggcgcagaccatcgccaagggcgtggcgttcaggttcgaggcgctgaaggacctattctacctgtggatgctgaggggcggccctggcgggcaggggccgcccgcgccgctgttcgggccgggacggccggtggccccgctgccgctgggcgtcaaggtgcccgaggtaggtgcgtgtgcgtcctaggtaggcatccaccctctgcgccgctcccgccctcacctttctcctgcaccagacctatcgcaaccactcgtgcacccggcactcaggtgacgccgctgctggagaacttccgcacgcacgccgccatctcgcgactggcgcacttcggcgtgctggagccgctgctggccttgttccccgaggcgctggaccgactgccgccagagacctccaagctccggggtaggcaggggaaaggggcagggacaggacagggacagggacaggggcagggcagggcagggcagggtgcatgcttggtgaacacggctggctgccctacttaccaccttggatcgcccgccttggaccccggcggcgccacacaggcccgaagcctctgttcctgctgccctcctgcggccggctggaggacctgctcctgccagacactgctgctgggggcagtggcccggccgccgccgccgctgcccgttcgggcgggggcgccaatggtgggggtggcggagaccgcggctcgaccgcagccgcagcggcggcggcggctcacgaggtggtggtgctggtgccgaccgaggcggccaagcaggcggtgcgccggcagctggggtgcggcgacggcggtgcagggcagcaggtgctggtgctaacggcactggagagcaagggcctcgagttcaaggtgcgtgcaggaggtgtcgtacatagttcatgtgggcgcatgcgttcaagcctccctgcttgcctgcgtgtgaccccacggcgcacggccctgacttgtagctccacaggaggccgtggacttacttgggtggcctgaacgcatgtggccggcgcgctcattcaccgcacgtaacctgtcgcatgttcggagcccgcccacccattgcctccacccccaaacccacggcctcaacccccctgtgccccgctcgttttcgttggttttggtttagtttgggctggtatttacaaccccacccccacggcctcttatctgcccgcaggttgtgctgctgtacaacttcttcagctgctcggctctgcagcccgcctcacgatggcggctgctctaccgcctgctggtgcagcccgagttcggcggccggctgcgacccgagcaagtggagccgggaggggagttcgcggcgcccagcttcgacctgcgggtgcgctagctatgtacatgcgtgcttccgtcctggcagcccgctgattgctgtgtgtgttacttgtgtgtgtgtcggggcagctcggcgggcagctgttatggcgcaagagcgtgactcggaccgcgccgccgcccctgcaagcgccgcacatcgcacaacatgcgcttccggcttgcgacggctaataattcgcccctctgtgcgcacgcgttttcgcgcaggttcacagcgtgttggcctcggtgctcaaggaggcgtacgtggctgtgacgcgcgcgcggctggatgtggcgattctggaggaggaccccgcagcggcggagcccgtgcgcgcgctgtggggaaagcaggggatggatctggtggacgagcgagcgcaggcggacgacgcggtaagatacaaaagcaggcacatcgtgcaggcacatgcaaggaagccatcgcgcgggcacacaatgatcttactaagacatcccgatcgcaggcacagtgccgacccttccccttctgcttcatatcctatcacatgcacgggattgtatgcaggtactggtccggctgcggcggcagatggagccggaggagttgcggcagcgcgcggcggacctgttcggggtgggcaactaccgcgacgcatcggcgctgtttggtcgcctgggtgagcgagcccagccttatccggcgtgcttgcttctttgcgatgcgtgcttgcgtgcgtggatgggtcgtgtgagcacgtcaccgtcctacagatgcattcgcacacctgccgacgcgcccctggccccaccatcacataacacacaggcgacacggcaaacaagctgttctgtgatgcccagctggtcaaacaagacgccgtgcgcgctcacaacgaaggcagagccaaggctgcagagcggctgcacgcgaccgcggcgcagctcttcatgcagtgcggtgagaactggtaacttgcttgcaggcccgtgtcgcaattctcgtgcagtagcgctgtcgcattgcttgtgccaagtctgtgcgtacgttgcaacctgtcaactggtatttatccatgtggttgcatgaatggacgcgtcgtgaacacgtggcgcgaccggagacgcattctgtcatgtgttgatgcttatttgacgtaacgcagggaggtacgcccaggcggcggagcagttcggggcggcgggactgtggggcgaggcgggagacgtgtaccacacccacctgcgggacagcctccaggccgccacctgctacgagcgcgcgggtcgctgggcggacgcggctcgccggtacgtcgcccccacacgcgcatgcacgagtgcgtgtgtgcagggtccgtgggtgtgtcagggagatgatgactgggtgccggcgtgtaggcgtagctgcaatcctgctgaggacgctctatcgcgcctgtcaagctcaccagtgcgtgcatcgttgtatgccacgcgcgtgtacaggcttgtggaggtggcgcccacgggcccggcaggaggaggagatggtggcggcgggccggcgcacctggaccgcaccctggccgcctgcgtcgcagccaaggagttcatgctgggggtggaagccttgcagcgctggagccagcaacccaacctcctgctgccgccgcagcagccgcagcagcaaccgcggccggcagcggcaggggccgccgccgcggctgtggcgcggcgcgcacagctgctgctgccacggctggtgtcgcggggcgcgctgcactggagggacgtggcgggcgggcgcgatgagatgcttcgcttcgtgcagctgctgccgggtggcgagacggcgcagcgccgctggctggaaaggtgcgggccaggggcggggcgcggacgattagatggatggatgctggaccctcgttggcttgctgtggatgggtgggcgggcgggtgtgttgaaagaaagtttattgtcggcacaatcgcacacacgcgcacacgctttcatgcaggtatcggctgtttgacgagatcctgcggctggacgtcgccgccggccgcttcctgtctgccgctcgcatcatggaggcacaggcggcggcagtgccggcaaccggcggcggtggcgcggtggcggcggaggcgctggggcacgcggtggagctcttcgtcagggccggccgggcggaggaggcggtggcgctgctgctgcgccgcgcgcgcagcgctgtactgtggggcggcgagcggtcggactggccgccgcccaagcggcccggcggcggcggtggaggtggaggcgcagcagcacggcacctggagcaggcgctgcaggtgctgcagcaggacaacgcggggggcaagatggggccggtggccagacgggcctgccagctgcaggcggacgtgctgagcctgctggtcaagtcgggaggtggaggcggaggcagcagcagcggcgagagggcggcggcggtgcacaacaaagccgccgctgctggcgtgcccctgcaggcgacgacaacgctgttggagcagtgggaggactggcgaccgcgtatcggtgcgctcgaggcaagcgcaggcggcagcggctgtggcggcgcagcggcgctggcgcggctgtgcctgctgcggcgcctgtgttatgaagccgtggaacaggcggcggcggtaacggcgcagcagcagaagcagcagcaggcgcagaagcagcttccctccatcaacagtgctggcaggccagcggcggccgccgccgccgccgccgccgccgccgccgccgccgccgccgccgccgccgaggcgaccaccgcctccattgccgccgccgcggtgcagctgctccgcctgtggggcctgtaccgacgctctctgacagacgtgctgcgtgtgctggagcgggcgcagcagggagttgtcgcagcggccgtagcgcccggtggcggcggcggcgccgctgctgccaggtccgccgctgtcgggtccgcggcttcctcggctgcggctcaggaggcggagctgctggcggcgctgcgggcataccacctggtcgtgcccggaggcgcacacgccgccggtgccgaggcggcggtgtctgccggcggcggagcgggcggcagtggcgccggcgggagcggcgagctgcggctcgagtgctcgcacagcgcggcctgggtgcgcccgccggcggtgcgcgcggcgctgcgcaaggtcctgatctccaggtgcagcctcggcggcggcgtatccaatgctgccgacgccgcggcgccggctgctgctgctgccggcggcggcgacggagcggcaaccgtgacccagcttgtgctcacggaagtgtcgcctgacacgttctacgccggcgcctcgctctactggcgagcggagctggaggcgcggtcggcggcggcgctgagggcgctgctcggcatggcggaggccctgcggcccagctatgagacctacaaggccgtgggggacacggcgctgacaggcggccggcccaacgcgctcgtgatacggacgccggcggcagcggcaggaagaggaggaggaggaggagccggcggcgcggcagcggcggcggatgccactcagttgcgggcgcagctgctggcggtggtggtggccgaggcacggctgctgcaacaggcgtgtgtgtgtgtgtgtgtgtgtgtgtgtgtgtgcgtgtgtgtgtgtgtgtgcgtgtgtgtgcgtgcgtgtgtgtgcgtgcgtgtgtgtgcgtgtgtgcgtgtgtgcgtgtgtgcgtgtgtgcgtgtgtgcgtgtgtgcgtgtgtgcgtgtgtgcgtgtgtgtgtatgtgtgcgtgtgtgcgtgtgtgtgtgcgtgtgtgtgtgtgtgtgtgtgtgtgtgtgtgtctgtgtgtgtgcgtgtgtgtgtggcactgcgtgcgtgcgtgtttgggagtgcatgtgaatggggcccttaacgtgctctctccggtaaatggctgtcatcgtgacatgtgcaacatacactccccaacctgctctgcagcttcagagcaaggcttccgaccgcggcggcagcaacaaaggcgccgctagcggcagggtcgcggcagccaacgcggcagccaacgcagcagccggtcgcccacctgctggtctggcagtagcagcagcagtagcagctgctgccgacctggacgccctgctggagcagctgctggccgccaccgtcacggcgccgctgccggcactgctgcgcgctgccagcctgccggcggcgcggcgccacgcgctggaggagctggaggcgcactacctgccgcgcctgctggcggcggcggcggcacggcagccgcggctggtgctgccgctggtgcaccgggcgcaggacctgctgtgggagcggcccgcgcccagccgcctgacactggaagaggtggccagggtggtgctgttgcaggtgggtgggcccgtggccggctaggcctgcattgcgcgtgccgcggacggaaggactggctggctggcatacgtcgccaccttcagctagccgtctgtatgcgtctaccgtgcctacgctgctctacgctgtatctgcttatccatctgctacttaccgtatctgtgccacctcacgtctgctccttgaacttgtgcgtgtctctgtgtgctgtaactacacatcgtgtgtgcagccgctgctggcgccgggcttcctgctgcgtgcggcgtacgagggccaggtggactgggaggtggtgtgggcccaggatccacggcgctactccgcctggcagctgctgctggagagcagccgggtggccgaccacgtccgccccctggtggctgcgggcgccgaccccggggacgtcatgggcccagcctgggtggcccgctctggcatcaggtgtgtctggaatcgagcgcggcatgtggtgcgtgtacaccaatgccagccgtgtgcaaggatcaaccatacatggaatgcactcttcaaacgacgctcaattacgcaaacagggcgctgctggacctgcaccgcggcgcctcgctcacgccgcagcagaaggagtggcggccctgggcggcggtgcggccgctgacgtggctggcgctgcttgagcggcactgcctgctggcgctggcggtgctcagcggcggcgccaacaacctggtggcccccagctccctcgtgttcgaccacctcacgcagcctggcgtggcggacctgctgaccctgagcctgcgccacacggcgcgtgaggccgcgccggagcggcgtcaggcgctgtatgccctgctgtgcgaggcgtgcgatgcgctggccagggtgctgaccgcgcccgaggccgtgcgcccggccggccgcgtgcatgacggcagcgcgcgtggcggagctggcggagcaggcggaggcggtggcgcaggtgggagtgccgcagcagggcagcagcagtggccgtcgctgcagcaacagaaggtgcagccgcagaaggcgcgggtcggcggcgggtcggcggcggctggcagcggcgccggcggcgccggtggcggaggcagggacgaggacggcgaggagttgggcatgttcctgcgccgagcggtcgcactgctgttcaccattgccatcaacgtgcgctcgccgccgctgcagcagcagcagcaggcgccacagcatccgtaccagcagcaccagatgcagcagcagcggctgcagcgtgggttcctactgccgcaggagcagcgcctgcagtcataccagcatatgatgcagccaccgccgccgccgcaagcgccggcaccgcagccgccagcgtctcctgcggcctcctgctggcgcgtggcgcgcgcggcggtaggcagtttagggccgccaaacgcaggcggtgccagggcgcccagcggcgctgctgccagcagcggcagcgctcgcggtggcctggcggcttacctgccgctgcttccctacaccctgcgcttcatgctgtcgagcctgaacgccctccacagtcgcagccctgcgctcttctctgagccgtcgctgctggggcccgagttctgcaaggcgctgcagcgaggcggtgacaagccgctgcggctgttccggcgcgccgtggcgccgccgccgggaatggcgtgggcgcgggaccggaacaagggcgtcaacgtcgaggaggtgcgggagctgccgccgctgcgagggcccggcgcggctgctgctgactatgcggcggcgcggggacagctgcgcaaggtaggtgtggtggcatgtggggccgctgctgctggctggcgttttgggtggcgtcggtcccgattaatgatcaatatgctattttccaagtaagtttcgagacacagagaacctcacaattaaacaacaaggttaccgtacatcccctttccttctgcatctttgcaggtgcttttctttgccattcccgagaacctgctcagctccgccgcagacgacctggcggccggcgacgacgacgatggcactgccgcagcagcagccggcggcgccggccagcagcagcctatgagctccctcggcgaggaccacgcagcggcggctcgcacggacgccggcgccggcactgtcactggcaccgctgcggcggcagcagcagcagcaggcggcgaggtaggctcggcggaggacgctgcggcggcagcgcggcagcaggtggtggccacggcggcggcgctgggccggcggggcttcgtgatgacgtgggtgtggctggctcgtgcgcggcagcaggcgctgctgccgcgcctcagtccgctgcagcgcgcgaggcggcaggcggtggctgcctttcatgcgctactgccctcggtggcgggtgctgccagggatggaggcggtgcgggtggtggcggcagcgctcagcggggcggggccgccaaaagccgcggcagcggcggtgagggtgctgacagaggcgcgaagctgccgggtcgcttcacggcgtacgtgtcgctgttcctggagcaggcgtgcccgctgcaggtcagtcggcgaagtgcgggggtatgcgaacgctgggctgcggccggtccgctagtgtgtctggcgcgcggcggacccctggtttcacctgctcacgtgcgttccgctccattcattggctgccgcacggacatgcttgctctctactccgttagttctcggttgctgacgtcccatgcccctccgatggtacacacctccgcaggtggagctgcagcagctgcagggggccctgcaggaggcactgcggcggctggagcagcagcagcagcagcagacgctgggtggcagtagcactggcgccgcagcgggtggcggcagtggtgctggcggggaacagcagcgcgacgtggtgcaggtgagagggttcggcgtgggtatggacacgttgcgttgcttgtaggcgcaacaaccgtcctgtagggacgtccgcccgcaccggctccgtggctatcctccgcgtatgtgcacctgctccgctgctgcttacttgcgcacctgccgtcgttgatcaagcacctgacgctcattccatcaccccgccacacacagctgcttgacctggcgtacgagtacacggagcggctggcggcggaggcggcggtgctggacgtggccaggtgcgcgggcaacggttggcagtagtggcaggcagaggcagtgcaagggcagtgcaagggcaaggcaagggcagggtaggagtttatgatgtacgcatgctccgcacggtctgattgctcatgcgggtacgctgtcccgcacggtctaagaaggtacagtagaggccgcacgaagcgcgacggaagctccatacgctcgttaagccttcttgccgctccgcgccgccctactttccaaccttccactaccgtattattcaccacatatctctatccgctcatccctccccccttcccccacacagccacgcgggccgccacgccgcctgcgacgcggcctggctggctgctggggcgctggagccgctgcggctgctggcggcggaggtgcgccgggagctgggccagcagctgccggggcaggcgccggggcaggagctggagccctag

SEQ ID NO: 21 - DNA, 2077 bp, Chlamydomonas reinhardtii
atggtgcaggtacacactgaatccggcagctggaaattggggcgaattggaatgcgcgcgaacgcttcccttcgttggacttgccggtgcaggtctacactgagccgttgtgcaggcggtactatggtagtgtcattggagaggcagcactgttccgcttttttgcgtacctctccgccatcgtgctggctctggtcgttgccttcgccaccgggggcttctgggtgaagctcacgccagataatgtgcaggcgacagtatcatacacacaggatgccatcctcatatttgaggtatgcgctgaatattcaggggggctttggtccggagcgggaaaggtctcgcatagtgtggccctagctagcgaaggctgcggggctgcaaacccatccttagcacgcgaaggggtcccttcaatgcgccacctgccgaggcgcaacagcgtggcaccgtttgcggctaactacagggtgcggagactgggcaagttgcgttctggagcacatcacctgtgctgaacgcggagttctccaacctgtatactgcggccagcgttcaggtatgctctccacctgttccatgtgccctgctcaccatgttgttgccccagtcctaaccacgttgccatccaactgcctgagtgggaaggttacctgcgtgtcgacatgtcgccacatgcggcctagccccaatcgtgtggcgcatgcgacgcacatgcatacaggtgtcgtctatggatgtgaacgatgatgggaaggcggacctgatcactttccaggccagcgtggccaatgacttcccagttcacagcgtcaaggcgctgttgcagcttcactactctctgacagtgagcgaaagcctgggctagctgtaagcttgtgcacaactgctggcaggcgtgtccatgaaatacagtgtgcattaatgccagctgatacgccggtgggcaggttaggcgttgcgttgttgctttcagcctggtggctgccttccatcgtgcctgctgtgccccgtgcgcactcgtgtttgccgggtgttaccaagcgcagggccacctgcagctggacatgtacagcttcgcgtacctggcgcagagctctccggctccaggggccgcactctacacggatggagaggcaagtagggagcactgctgtccctgcccccgctggtgtagcatgcatatgtgggaatgggctcgcacctctctcattggtagcactgacagacgctgcaacacatatgtgtctcgcgttcggaaccaacctcatgtgcttggtgcgctgcttttgtgccaaaaccgcagctcttgctgtcatccacgaaccagcttcaggaccggaactacaactccagatacaacacgccaatgctgaactccagcacgccatcctactccacagccgtgcaggtatgggcactacgtcaaagctcagcagccagtgcattgtgtttaccctgattccttgattgttaggctccagccgcctttatacgcaagctttcgacattcatacttttataatacccgtgtgtgcgcagccgtcagtagcgctggagatgcaaagcatcctgagcagctacctgagccgcaacttcaccaccacctacagcaacaactttcccgtctgggtggtgagaaccgtacgccgcacatgttgctcacttgctccttgtaccttttaaggtgtttgttaaggacccctgatgggtaacccgaatgcagggcggcacagggacctcgtttaatttgcaaatgcgaatacggattccgcccaaccaggtcatcttctacaggttagtcatattagcatggtagctgttgctaggctgggctcctggggcaacatactcacactcaatattgggcttgcccacttgtctaaggtccgtcaaacgtgttcgtcaatgcaggcctcaagccattgagatgctcaagttcggttggatccagtggcttgccacgttcattgtgctgtggtacctgctgcaatgggcagagtggtttgtgttctactaccgtttggtcgagacgcgggttgtttcagacctacaaccaaggcaacagcgtttttaa

SEQ ID NO: 22 - DNA, 2438 bp, Chlamydomonas reinhardtii
atgggcagcggggagaaggtgaggcgatggcacgcgtttaggagaatgtgaccaaattgcgcgtttgcgttgaagcgacgcgttggactaacctttcccgtcctcatgatctgatacagggtgtgatgctctgtgagcgaccaaagccctccgcggtcgactcgtcgcctgggctgaagccgtttctcccatcgtcggtgccctctaatattgagccgctggggctggtaccaacccaaaaggtgggcgagcgttatgtttcaaagcaccaccgtcggtggcaggcggactgttctgaacggcgcagcggacgtgccgtgcgcgtgcaggtgttccctcccagcctggcgcccaagcaggttagcgccaccagcaagcatgtgaagtacgtgcggaacctggagcaggagaaccgtgaggtgagttggcgctttagttcggctgggcggcatgcacaggggtagcaagactaataagcgacgtgtgaaggcgatggcggcacctgccgccagagcagcaaagcgcggtgcctctacacggctgtttcagggacgtggacttagcccttccttgttgtggtaactgcaggcggcgctgcgggaagaggagcggcggatggctgaggcggccaaggcggagagcgtgacttcgttcaagtgagtggctgtgtcgtgtgctgcccgccctgccaacttctgcctgacatcaccagacagcatctgggcgcgcagacgatacacacctatttaccttcgcctgcacgccccgacctcatccgtgttctccccacagcgcgcaactgcgagccgcaatcctgaccggagaagatgtcagcttctggcggccagctaaaggcgcggaggcggtccggcagtccctagcggagtccgtcgcacggaccgccgccctgggcagcggcagcccgcaatcaacagccgccgcagcggctgcagcggaggcggcgcgcaagcgtctggagctcacggcgaatgttagcgggttcgtggaggaggtggttggcgaagccaaccagaagctgacggcaacgagcaaggtcgccatggcctcgttcgtagatgaccttttctcagaagccgcgggcgcactagcactaggcggcgaggacgaggaggctgcagggcgggcagacggcacagcggaggccagcaccagtgccgccgccgccgcaggcggtgccaagcccggggcggccaaggccgcggccgcgggcgggcgcaaggtgcgggtggcgtcggctgcgggcaagccggcgtgggctctgagctcggagcaggtggagaagctggaggaagctgaggaggaggagctgctaaaattcgcggatgacctggactttgacaacttcatgtcctctctcgacgaccccgagctgcaggtgggtgtgtggtagggggcagcgcagggcgcggaaaaagtcataataagtagtagtaagtagtattaagtaaaataagtcttacttaccgcgatcgtacttaccgctactttgggggtccagtccgaggtggggtggggcccaggcataactggtttgttaagggcagggcagggcggggcagcaagcgggatgtggttaggtggagagagatagacggtggaggagcgatgatacaagccgagccaaaagttggtctttgagaaatgaaggggacagcagggcgtgaggaggctaggccatggctggagggggcttgatggactgaacatgacggtttgggtttgggttgaggtggaggcagagtcatgcggcaaagcgcagggcgggggcgccaaaggaaaagagtgcaaccagtgcatgaagatcttccttgggctgcggcggtggccatgagtgtccggctgcgcagtcacccaagtgatccgcccgcgctcatcttgcccccctctctattcgcccccctccgttattgtccccacaggagagcgtgcaggcgctgcgtggcgcggacggcaagggaccagcgccgggcgaggagaaggcctggcgccagaacctggtcaaggccatgaaccatgtggccatgcggcaggtggcggcgcggcgggcggcggcggcggcggcgggcggcgccgacagggatgacgcgtgcagcattgcgggcatgtcggagggcggggctagcatggtgtcacgcgccacggctgcgagccggatgaagtcagaggcggcggcggcgaaacgggcggcgctggcggagggtggcgagggcggcggcaattgggagtcgtcgacgcgcgcgggcgaggacgtggcgcggatggagcggtcaaaggcggcggcggcggaggcggcggacttcctgcgggaaaatcccgagctgcgggcggtgcactcaccggcgagtgtgcgcgcgatgatcaccaagactgaggcggcgggcgcgtccgggggcagcccgcttgcgaaggcatcgtga

SEQ ID NO: 23 - DNA, 4163 bp, Chlamydomonas reinhardtii
aggttgcatagctaacccagccaacgtccagccgaccccaaacctccaaacctccagcgagcgaacactatccgaggtgctcgccaaactcgcgaccgcgcgctccgcaactatggagcgagcacgccaaggtatctttcctttgcttattgtagcatttagtataatccacctgcgctcaatgtgcgttctccgtgcagtcatcgcgcatcggcccggccgcggcgccagcaaggagccttcacgcagccaacgtaccaggtgtgattgcactggggtcatcgccatgctggtactccctgaactatcgcatcctgtcgcgggcccggctgtctctttgcaccgcacccgacacagcgctgccggatcccacgctgccgcgcgggctcggtgcccccgaagcgcccgcgggagacgcccccctccgggcttttgctgctattgcagacgcgttaagcagcccgcctccgcacacagtcgctcatgttcgcgctatgggcgaagcagccacgcagccacgcgccccagctggtgcacttctgcgacaggccgctcccccagctctgggcccctgatccccgtgccacgttgctgcgcttaggagcgccgcgactgctcttcgggcaggcgcagcatctcgtgacggacctggtgatctacgagtcgcagcaacagctgccgcagccagggtttcagcgtaacccgcctgcgctgctggtggatgtgcgacgcagcctcaaggagcggatgcagcggcccccagaggacgcaaaggcctgctcgaacggcacattcattgcgttctttgtgacagctggtcacaaaaccgccgccaagcagctggctggtggtggcttggcgcgtgcgctcttctactcggacgagtggcgctgtggtgagggtggtcaagaccgcgttcgggggcacctctgttaggtcattaggtgaagaggaaggaaggggcagcaatcgcgcatggggttgggagtgtcacggctcctcgtaagcatcacggggtactgcggggttagggtgcgtgggtgttgcttcggcgttgctcacacgcgcccgcgtgccttgactaggttaaggataaggataagtgttcgtaccctttgcctgggtatgtaagagcacattgaccaaccaatgcgtgcattccgctgcggagccccctggcttttggtttctggtatgaactaccctgccccctttaccctgtcgacaggcccatgttcgtgccgccgacgccatggccaccctacgtgtcaagagtgaacctggagccggagctgctggactggtatgcggacttcttcgacttctgcgggctcccccagtaccccacacgcgactcgctgtttctgcctgacgtggtgctgagcgacactaccagcggcgcgccggcttccgcatcaaggacacgctggtgcatgtgcaggtaggatcggcgccggtcgggcagcaggaggctgttcgcgctctgcaggctgccacgctgcgcctctactccatgcttcctttctcatacattgacgcacccgtctcgtgttgctgttgccttgcgcaagttctggagagtgctgccgacctgggagcgccgcggctgacgtgcagctgccgtaacttgagcgacctcgcctcaattgcgcacgggtgcctgcacacgcagtgcgcccagcttgtcacgctgccgcagccggggccagccccgccagtgcacgtgctcatgccgcgtggctcgcagacgccccggagcgccatcctacccggcgactacttctggctgcaggaccacacctttgtggcctgcgcggcccagacaagcagcattcgctgcacccgcagcggctgcggggcggagtgccagcacgtcaagcaggtggaggaggtcttcgggaagcagctgccgccggcagccctcggctcccgccacaagccgccaaatgaggagcccgggcctgcaagtgaacaggctggcgtgatagcggtagcagcggcaacagcggcagccgaaccgccggcggaggtggcatcgccgccgccgccgtccgtgcggtaccccttcccatgtggcgccggcacagctgatgccatggccgctggggaggtgggtgtggcgtccgcgaggttgcgggccatggaactccaggcgtctgctgcccgcggtagtagcagtgatggcggcagctgtagcagcgtcggtggcagtggcggtggcggccgcagcttttgggggctggtgggtcaacagttgacctggtgccgccactaccagccgggggctgctgcgcgtatggctgtgcctactcgccgcggctatttcgcagcaggcctgtcactgcgtacggctcagacacgattggcccgctgcgggcgcagctctaccagctcacttcgggccgtggccgtgagagctgtaagctgtcatatggcggagcagcggacggcttgtctcgctacagcagccgctccttcttcagcctgcgccacatacaagggtatgcagcattcctcctgcgctgtgtagtgccgagcctggggcttacaatgagagacgcctgagtctcgcaagtacgcggtggtctggtcgcgtaccggtagggtttgctgtccaaccctagggctttacatctggtaactgcccgggacatagcactgacgctgtgtgcaactacctgagttgctagtgaggcatctgtctgcgtcctctctatcgggtcttactgtaattactgtcaacctggcgtcaacttgcggtaatgctcttttacgctcaccgttaccggcaggaacattcctaccaagggtcctgcacaaccctagtaaccgtcctgacacacggggactattttgctgtccctggacgccaaacccggtagttctcactacctcccttaatcaggaatagcacatcacgctgcggcatcaatgtgctcaatgtgaaggcgcagcatgacctcgccagcgcgacgctcccccctgacccagaccggccctctcagttttcggagacgcttttcggctcgcatggcatcagttcgaggctcggctggaccgctgccacgtcgtcacctgccccatctgccagctgtccccgcgcaagctgatatgcgacgggacggccgtcacctaccagatcgtccactattgcggcgtggcgctcaccaccctggcgccggttgccgccagcagcagcgagggtgtcggcggcagcagccgcagcaatggcagtggcggcggcgccggcgccgtgagcacacccgcgcagacggcagctggtgcccgacggaggagggccgtgccgtgctgagtgacgtcacacgctgctgggcagcggcaagggcgtgtatggtcgcgcggtggctgggtggatagcagcgcccgacatggccgccttttctaatcacctgcatgcggactgccgggaggtgactacgggcatcttgggcgtgctcctcgctgtcacggcaagtggtggcagcgagcctggatcgcccgcgcgcatggccttggtcggactggtagactgcctgggcagcacggcacccgcgtgtgcgtacctgcccgcggcgtgtctgcatgtcgcgggcgtgtggctggcgatgcaccaccctgagctgcggcagctgcagcaggaggagaagcaacaggagcaacagcagccatggaacgacggggtagccctctgttcacttgcggcgctactaaagtcccgtgcgccggtcctagccgctgcttgtaagccattgcgtactgcgcaatccgccagccgccgggcaccctgcttccagtggccgcctttgtagcgcgcctgagctgcctgtcggagaagtgcaagggctttggcggcgggccgcagcttgcttcgtgcggagcagcatccgccgacacggacgagtgcctgcgcctggtggcctatcctgcgtccaccagctgtacgccacgggcttgtgggggtaagaattgtacattgtgatacacgtagattatgtgaagcaggatgtgaaggtactttacagggatgtgaaggtgttggggggggggggggttgcttggtgattatataaacgcagagctcgtctcttaaagctttgaagcaggatagggctatttcagccgtttcctgagcactagcctgggcccggaaagctcagatttta

SEQ ID NO: 24 - DNA, 2829 bp, Chlamydomonas reinhardtii
atggctccgacccaagcgggccacgacacagcctacctcaaagagaccgtaggcgaggccctcgctcggggatgcgcagccgctattagcgcacagccaaacgaccccgtggagtatctgggcctatggctgctcaagtaagcggggttgcatgcttatcgtctgccttataaggcatgcctgtgctaatctttgcattgcaactgcagatacgtgaaaaatgctgaagtagaagggaacttttatcgcgagcggcaacaggatttgcaaaagaagaaggaccgactggtgagtgagcgtcgcacaggaaccgcagtaccacgttttaggggtattgagaaaccgttcgcgtgggtccatgcgcggtcgaagggggtgagggtggccgcggcctgcgcggggggtctgctgacacgcacggcctcgggtgctccaaccgtcatacacccacttcctgtcctctagcgttctgccccacggtctcatgtgcctaatgcctaccgcgtccattcatctgccaaggtcaaggaggcgcagtcggagcaggcagccaagtcagtcgcgctcacgcgcaaggaggccgcggacgcgctggcgctggtgaccgccgagccgcgcgagctactggaggccgcggtgaaactggtcaagcagcacacagccgcaggcgcagcatatgccgccgtggtagcagagcctgaggagccggactgggtggcgccagaggacgacgaggcggcggcagtggagacggaggacgaggccgccggcggcgccgcgctcgcagagggcgaggagccgccgccggagcccgagccggagccggaagcggcgccggaggacggcgagggcgatgcgcccgcgcccaagattccgcgccccgtggactacagcaagaagtactttgcctacgtggccgccagtgcggggcaggagcacgtgcttgaggccgacctgtaccgccccgcgccgccgcccgaggacgccgacgaggacttcaagcccgagccgctgccgtacagcttccgcgtgctggacgagaagctgcccatgctgtatgtgcccaacgtggccgccgaggagcgcgtcaagttcttccgcaagttccccaagataggctcctaccaggcctgcggcgttgcgctgccggccagcggcgagttcaaggcgctgctggcggcggacacgctgttcccggagggctcgggccagccgctgagtgccgacgaccgcgactttgtgtgggaggtgtcgcagtcgctcagccgcgcgctggaggcggtgcaggcgcgtgccgccgaggcgctggcggccacctccgcggcggaggcggtggaggagctgaaggccaaggtggcggagctgcgcgagcaggcggcggcagaggccgcggcggcggcgccgccgccgcctgccgagggcgaggagggtgagggcgaggcgccgccggcggaggaggagccaccggcggaagaggaggcggaggaggaggaggaggaggccgaggagggggcggaggagggtgctgaggagggcgaggagggtgaggaggcgccgcccaagcccaagaagaagaagaaggtgttcaaccccattcccgggctgcaggccgccattgagaagctcacggccgcggcggaggccgctaccgaggccgacgcgcgggcgcaggccgccgtggcgctggagaagcaggcgctggatgaggtggtggcgttggcgagctcacactcggacgcgacgctttccagcctgcgcaacatgctgagcgtgccgcagggcacctaccacgtggtgaaggcgctgctgcacctgctgggccgccccgccgcctcgttctcgacctggaagcgcgcgcacagccacttcagcccgcggctgtttgaggacatggccgcctacgacgcaacggcggagcgcgacatggcggtgtggggccgcgtgcgcagctgctacaaggcggcaccggcggccaagaagctggtgagcgcggcggggttgggggctgcgggggagctgcgcggtgtgctgaggggagatgcggggtgatgcaggctgtggggtcacaggttctggaaaaacactcttggccgggcgggaagagattgaagggggttgcatgattatgtgctgccagtgatgctttcaagcgatgcgttgtgtgcctggttgtgccgctgggagcgctgtcacagcatccggcttttcttcctgctcttgcccttgcctttccaccttctgacaacacccgggcacgctttgcttgtccctccctttacaatccctcaggacgcggagatgccgaacacgctgtttggcagcgtggctctgatgtacatcaagcaggtgcggcgggtggcgcgcaaggcagtgctgcagcgggagctggcggccaagctggccaaggcgcagcaggacctggccgacaagcaggcggcgctggttgaggcggagcgcgtcaaggccgagcgggaggcagaggaggcgcgcctggccgcggaggcggaggcggccgccgccgccgaggcggaggccgctgcgcgggcagcggctgaggcggaggcggcagctgccgcggaggcggcggcggaggcagcggctgaggcggctgctgcagcggcagaggcggcggcggaggccggagagggtgaggcggtggcggagcgagaggctgctccggctgaggccgaggctgctccggctgagggggaggcggcgccgccggcggagggtgagggggaagcgcagccggcccaggaggggtcgaacagctcgagcagctctagtgactcgtcgagttcggaggagtccaaggccgctgcggagtaa

SEQ ID NO: 25 - DNA, 396 bp, Chlamydomonas reinhardtii
atggcctgggaagcctacattacctccaacctgatgtgcccggtggactcagagggaaacactctggacagcgcagcgattctgggcctggatggcagctcagtctgggcgagcagcgccgcgtttcaggcgctgaacgatgaggaggccaggaagtttgttgctgcattcgatgacgtctccattgcttcggtgatgcttgcgggtgccaagtacctgaagacttctgcagacgggaccattttccgcggccgcaaggacaagagcggctttgttgctcgcaagggcgcccagtgcatcattattggcttctacacggatccgccggtctccgcccagacctgcaacaaggtggtggaggctctggctgactacctcgcggaccaggggtactaa

SEQ ID NO: 26 - DNA, 1668 bp, Chlamydomonas reinhardtii
  misc_feature (143)..(242): n is a, c, g, or t
atggtaattacggaggttcggcaggacggcacaccggtggactggagcggctcacgcttggtcgggaacaaggactacactgttattgcagagccagcggcctcgattttccaggtgctccagaacggcaaaagtgaagcaannnnnnnnnnnnnnnnnnnnnnnnnnnnnnnnnnnnnnnnnnnnnnnnnnnnnnnnnnnnnnnnnnnnnnnnnnnnnnnnnnnnnnnnnnnnnnnnnnnngtggagcaaatcgaactgtcaagtctggagcacctggaaaatcgaggccgctggctctgcaataacagtgtaatccttgttcccgaccaagcgtgagccgctccagtccaccggtgtgccgtcctgccgaacctccgttattaccatcgtgatgcctgcgctgttgcaagctgaagccaccgcgccctcgacacatgacttaagttgctcatgacctcgcaaccgcagcagccaacaccatccggggccggccctgcgtgtacctgctgcgcgcccggctgaaggacgggcccaaggctggggagtgggtcaatgtgtacctcggctgccagcaatccgacacgctgagctactcgcgctgggacgcttacctggtccatggcaagtccctgcggtggtcggtgcgctgccaagcattgcatggccggccggggcccacacaggagccggccaagtgggctgggtgggcctggctgctgacacactgtgatgctgcagagctgcggttcattgacctgtctgggctgactaaggagcaagtcttcagggtggagcgcagcttccttgacaagtacgactttcccttcaactctaccgacaaccgctgctaccgcctcactgtcgcgaccttctggggcagctgcagcattcccaagatgcccatcgagctcaggcgctgggtgggggaggagtggtggtacgcggggctggcaaacctggagcagctgctggtggagcctggcgacgtgcggtcctgctagtgggggcggcgggcaggctgccgaccggggtgccgcgcctgcgcaacatcatcgcgcaaatcctcctgcatgcctgtggcaagcagaagttccgcaccacaaagagcagatactaccgtgagctttttggagtacagagaccctggactgctgcagctcgccaacagcctcggcaagcctgctcagtcggtggcgtgtgcggctgacggtgcattgaacacccggaacgagttcacgcaccctggcagcgtggctgccatggaccaggaggtctccgagatgatggagctcatcacgccgccggagctggaggacaagtgccctgaggagtgcatgttcctcacggcgtacgaggacatcaagaacgccttcccgcaccgcttcagccaggtgagcagctggggtgatctcacggactggaacgcacgaactagccagcttgccttcttgccttgtcattgttcataggtctgctgttgtgtccggtgcgtggactgtggggtgtgggaaactggatgggaaactgtacctctgccgttcttcactcttgcgtgtcaccgcctgggtaggacaaggggcatgccggcgtggctatggctcaactcacgttccgcattcttcctcccgtgcactgtgagcaggttggtggcgctcgacagcgttga

SEQ ID NO: 27 - DNA, 3900 bp, Chlamydomonas reinhardtii
atggtgcaaccagtctcggtcctcacgccaggcgtgcagagtggacttggtggactaggtgcttcgcgtcctggggcctcccaggcttggccgcgtcgacctgctgttctgagtacattcctgggcacctccatgctgtggcgtgggcatcgtgcggcttcttcgacgggtggccatgtggcgcagcatgtatgctcggcgtcgtccaagtcggggcgcacagtcaagataacccggcggcgtggttcaggccacagcagcagcggtggcacgggactggtggcggtgcccgccgacgggcccgccacttcgtcgggacgatacagcggcagcatgctgggctcggcctcacggacaacctccgggcggagtactacgtcggcgccgccgcaagtgcgggaagcggagtacctgagctcggacaatggcagcgctagtgacaccaacgcattcgcgtggggctggtgggagtcgctgccatcccgctacaaaatcatcgtgggcacggcagtgtcgtttgtcatctgcaacctggacaaggtgggagcaggggcgggaaatgacagggccgcagcgccacaaagaattatggaactttggggcgctcgcaggcctaggcaggagggctgcacgctgcgagtggcgtgggagtctggtgggctggcagggtatgcgctggcacgggcagtctctgggcagcttccaccacctcctcgcggcaaccaaaacccctgtgcggccccaacacatctcctcagcatcatcttcaatcaccgcgctacgttcctgtcatgtctcctgcatgccatatacggatgcaaaccaccgacgcacccaacaccaccaacgccaacgccaataccacagcaccggccactcccagtttcccaggcgctcccaacccacgtccccgaacccctttccccactgaccctcccatttgcctctgtcaggtcaacctgtccgtctgcatcatccccatggcccgcgactttggctggagccccaccgtggcgggcctggtgcagagcgccttcttcttgggctacatggtgtgccagctgccgggcggctacctgaacagcaggctgggcggccgccgcattctgcccgccggcgtgctactgtacagcgccgcaaccggcgtggtgccgtgggtggcggccagcgtgccgggtgggtgccatgaggagatgggcgggggcgggggggcgggagccgttcattgggcaacggggtgatatcttcacaagggcggaagggagcggaggctgcgaggtatagggtatgggcacgggaggtgggcgggggcgaagaggagtagtaggcccagggcgggcagggattggaacacaactggcgtgctagaggtacggggttggagaaatgtcatggcaggtaatacggacgtggtttacaggcagccacgtaagggatcggaatggattagttgcggggcgcccgtcagaggcaagccagggggcgaacgaggccaacggtgatgacaggcctctagctaaccttgacaccttccccaactttccaaacccatgccatcctccgcagcgctgtgcgtgtcacgcgcctttgtggggttcggccaggccacggcgccctctgctgccaccgacatgattgcgcgcgctgtgccgcccagcgagcgcgcccgagccgtcactttcgtcttctctgggttccacgtgggctccatcctgggcctgctgacggcgccctggctgatccagcattacggctggcaatccgtgttcgtgacctttggcgcgctaggcttcgtgtggtggctgtggttcgagcaggtgggggcctgagtagagcggaggagagtaggggaggggtgcgggcgcagcggatgagcagagacagtggaaggggtgggatgagagtagggaggcgcggcgtaataaacagggcggcggtgtacgatgctgaatgtataccttcgagttgggctaaggcaagcggccctctgtattggaacaccgggccggcattaaaaacctcctctgcgtccccactgtccttacgccctcgtgtctttctgccctgccttcttgcagggcatcatgtcgcgcatcaaggctgaggagcccgacttcgccacccgcctggtgtccgactcgcgccgcatcgcgcccatgaccgacgccaacagcgtcacgtccgcctcctcctccgtagtcgtgaccaacaaggcggtggccaaccggggcgcaggcgcggcagccgccgcggcggcggcagctgctgccgcggcggagccgccgccgatgccgtggcgcgctttcctgcggagcaccccggtctgggcgctggcctacacacacttcgccaacaactggttccactacaccatgctcgcctggctgcccacctactttgtggacacgctgtctgtggacctgctgcatgcgtcccaggtgcgccgggaccggaaaacattgaggattgggtagggtggggtgttcatagcgttcaatgtagtagccggcgacagcgcacctgaagcgcgccaggtttcctccagaccccaccaaacatcatgttcaccggcccccgtcgcagaccgcgctattgccgcctctggccggtattgccgcctccgccgcggccggcgccgcggccgacgcgctcatcagccgcggcgtgcgcgtgccggtggtgcgcaagctggtgcagggcgtcgcctttctggtgcccacggcgctgctgctggcggcctgcacgccggccatcgcggatgacagcggcctgacggtggctgccatcacggtggcgctgggactgagcagcttcagcctggcgggactgttctgcacacaccaggtgaggaggggccggggaaggggcacgaaaggggcggaaacatcggcagacacggtacgagcttgtgtgcatcccttcccgccgcccgccgcagcttatataaaccgcccacgtaaccgcccacctcccatgcccccggccgccacccgttacctcacaggacatgtcgcccaagtacgcgcccatcctgctgggcctgaccaacaccaccgccgccgtccccggcttgctgggcgtggcgtccgtgggctacctgtttgagcagacgcagtcctgggaggcggcgctgttcctgccctccgccttcttcatggtcacggccgccgcagtctacacgctgtgggggcgtaacgaccccatcgacttcgacgccgccgacaacggccccttcaggtgcgggtgcggtggtgcgagcaggggcattgggatgtggacaacggggcgggttgtgcgtgccttatcacgcgccacaggcccaggccgccaccgccaaatcgcggatgacatgcgtggccacacagccgaaccggactcggttttgagcagcggaatgcgccctctctttccttctcaccctgccaccgtgtctcgttgcacaggtttgagtcgcggatcgctgcgatcaagaaggccgttgacgacgcctttgactttggccagaagccctcggccggcactgatgtggagcgggaggtggacgtgcctgaggtgccgccccggccgccctccagcctgctgggccccctggccgacctggtccgcggcaccagcagcgccaccgccagcggcgacgacggcgacgagggcggcagcgtgcgccgccgcgtcggcggcgccgcccggaacgccgctggcagcgggcgccggaccagcggctccagcagctcgggcagcggccggcgcaccactgtcgggagccagagccggcggtcgaccggtgggagccagagcaaggcgactggcggcggccgccgggtgcaggaggcggaggaggaggggccgggcggcgtgtgggagcgactgcgcgcgctgctgggccagccccgcgagtactaa

SEQ ID NO: 28 - DNA, 587 bp, Chlamydomonas reinhardtii
atggagaagctacgcgccgcgggcaaggccgtggagaccgtgttcgtgagcggcgaccgcgacgaggcctcgatgaacgagtaccacagccacatgacgtggccggcgctgccgttctcggacaagaagcgcaacgacgagctcaactcgtgagtgctatgctccattagttggggaactcttctttgccaaggggaaacataatgagtgcgcacctgtccaagcgtggggtcttaccttgatggtgtgtgtgttccagtcttcagcccctgaagcagtgcgcatgcatgctaggtggcagttgcttgccgtatgccgttgccgttggactttctggcttcctcacatgagccgttgctgcactgtgccctcgtaggtgcttcgaggtggagggcatccccacgctggtggtgctggacgagcagttcaacgtaatcacaaccgacggccgtgaggccgtggcgtccgacaccgagtgcacgcgcttctcctggcgcccgcagcctactcatcagctgcgtggcggcaccatcgacaacatcaacgaaggtccctgtcatggtggtggtggtaggtgcggcggatga

SEQ ID NO: 29 - DNA, 2062 bp, Chlamydomonas reinhardtii
atggcgcctgccgtggtctgcgatggggacgtgtgccgcaaggtaagctgcacgcatctcaggttcgtgttcatgcccacgtgtcctttgcgcatgccacccggccgggctaaagtgttgttagacttcgcgctgaccggccattcggttggcgtatgacttcaggtggacgctgaggaggccgcagctgccgcctcccccgctcctgctgcggccgaggagcccaaggtcttccagattctgggcgactcactgctcggccccaacggcactcaggtgcctgtctccagcatcactggtaagtgcgtgcgtcgggggcctgggccggcaacttttccaacatgccgtcattcggacacagcttgacaacccttacttcgacctcaaatacccaggtcctggcaaggtggttgcgctgtacttctccgcgcactggtgcccgccctgccgccacttcacgccccaactggcctccatctacgccaacttcaagaaggatcacgcacgcaaggctgactgggaggtggtgtttgtgagcagcgaccgcgatgaggagtcatttaaggagtactttggcgagatgccgtggaccgccctgccctacggcaagcgtgaggccaaagcacagctgtctaagctatacaaggtgcgtccggcgtgcatggtagcttgctgatagcttgctatgccaggttagtagcatggaaacaagctggtaatacgcccgcgtttgggtttggtaggtcgcaatgacacatacagttgtcattgcacaataatccgcgtctctccatcctgcacctacccaagaatgtcccctgcctcatcccggggttacaccccagcaggtgcgcggcatccctaccctggtcatcctggatggcgagaccggtgaggtgatcaccacgagcgggcgagacgccgtcagcagcgacgagaagtgcgagggcttcccctggcggccgcgcacattcgagcagatcatggagggcgcggtgctggtggagcccaagacaggcgctgaggtgccggcgctggagcggctgcgcggcaaggtgtcactgctgtacttttccgcgtcctggtgcccgccctgccgccgctttacgccgcagctagtgacggctatggagaagctatgcgccgcgggcaaggccgtggaggccgtgttcgtgagcggcgaccgcgacgaggcctcgatgaacgagtaccacagccacatgacgtggccggcgctgccgttctcggacaagaagcgcaacgacgagctcaactcgtgagtgctatgctccattagttggggaactcttctttgccaaggggaaacataatgagtgcgcacctgtccaagcgtggggtcttaccttgatggtgtgtgtgttccagtcttcagcccctgaagcagtgcgcatgcatgctaggtggcagttgcttgccgtatgccgttgccgttggactttctggcttcctcacatgagccgttgctgcactgtgccctcgtaggcgcttcgaggtggagggcatccccacgctggtggtgctggacgagcagttcaacgtaatcaccaccgacggccgtgaggccgtggcgtccgacatcgagtgcacacgcttcccctggcgcccccagcctttcgagcagctgaccggcagcaccgcgaatcgtatcaacgatgggcccgtgctggtgctggtggtagatacggcggaccagaaggccgcggaggaggtggctaccagcgcgctggccgaggttgcggctgccaccaaggccgcgcccggtggtgacgactggggtttcctgtgggcccaccgcggcgaggagattgccaagcgtgtgctcgcgtttgcggggttggtgaaggactctgaggtggagctgccggcggggcacgcggcggtgatcattgacgtgcccaaccacgaggcagtatgggacctggcgggcaagggtgtggaggttagtgccgtggggctgagcggcgctgtgtcggacttcaaggcgggcaagctgggacccggcaagaagctcggtggtgagggcgatgacgacgatgagtga

SEQ ID NO: 30 - DNA, 6905 bp, Chlamydomonas reinhardtii
atgggttgctcgtcttcaaaggatgaggtggagctcgcccagcaggtgcgtttgagcgactcaggagcagcggtcccgggtttgggttgcgtttaactcgcgctcttttcgtggcgcgctgcataatataagtcagtggtatgaggggccctgcgtcttatgttgaatggcgcttcggtttcatgccctagcgcaacctgggctcgcggctgaaagcagcgtagccctcaatgtcctgggcaattggggttatgatttggtgctgaagatgagcgcggcaagagctctctagtgacggacacgggctgcgactaaagtgagaaagtcgctgttttggcagtcccgcaaggctcctttaacccgcgctctcgagacattgacagtgaataggcaaacggtccacgagtcttggactgtggagccgccgacagcggcacgcgcacacgctgactcgcggaattcttccgagtccttttcccccgtgaccctcctacaccatgtgcctgcaggtgctgggtgcgaagaaggccgctgacaccaaagcggtgcggcgactgtcggcgctggggctggaagacggggaggtgtggatcacgcgccagaccacggatatacgcaaggtgcgcgggtgccccagcttgagcgcggcgaacctgggcgaacgcagggatgggttggcgcgcgtgcgggagctggagatgagacctcggattgcaacaccggccccaccgccccaagggtttgcgtgggcacagtcctacattcacaaaagtttgcaggcggtttgctctggcgctaaggcccgtcgtgttggggatgggtgggagctagcagtccagttgacatgggaggctgcacacagctgggacaggcgtgcgccagcatttctaggcccggagcgctggtccattgcatccagcaagccatgacgtcgcatctaagtcgtacacataaagttctggtaccttgttaacaacgccactgctgcaggtgttcaagtttgggcagcaaatcaacaaagggcagttcggcgtgatccacgtggtcacagacgcggcgggcaacaagtacgcgtgcaagcagatcagcaaacgcaagctgacagggcccaactccattcgcgacatacggagggagattgagatcatgcaccaccttcgcgggtgagctgcgtgcgcgcgggctgctgggacggcggtggtgccgcgatgattctggtcttggtctttgtcgcgggtcttggtcgtgggtcttggtcttgggtcttggtcgtaccacggcgcacaacgcagcgcaacagcaggcttggcggccccgctgggtgcttgtgaagcagtgcgggagcaccaagcctgcgcaccatcatcggggccggatgtcaccttggcatgcttggagtgggcgcccttgtctccttcacagacaccgtactggggtagaacaagcacctacacgcaaggacatgcgcacacacgcgagcacgccgcctgacgcgctggtatgtgtgttggtatacaaccgcgcccacaggcaccccagcgtcatcaccttccacggcgtgtacgaggacgtgtcagacgtgtacatggtcatggagctgtgcacgggtgggtgggttgggcgggtgggtgggtgggtgggtgcggcgctgggtattgtggtggtggcgatgggtatgcaagtctaagtccgaattaaccggcatcaaaacaaacctgatgcgagttagcggctagaagtccgttcggatgcaggccacaacaggccaaataagggggccggtggtgttcaaggtggtggaggggcaggggtggcagggcagggcgtggaggcagccactcgtgcacgtgccagccacgcactagcacatttctgcgcatgccgttcacacgtgcgtaccgcaccgcgcccaacccggcaggcggtgacctgtttgagaagatcgagaagatgtccactgtcacggagcgggcggcggccgcgctgttccgggagctggtggagtgcgtggcgtactgccacacactgggcgtcatgcaccgagagtgagtcgcgcgttgctggctgcgtgccgcgagctgttttgtgtgtctagggtatttgcttgtcacgcgttggcctgcgtgggtctgcgactctgcgttgttttgcgtcggtctgcggaggcctggtgggggggctggggcgctggtcgacattggaaatatggctcatgtgcgaggtcttcagcaccaccgctgctcagccgaaaccctcctccttcacctgctcgtcctcctcctctctgtctctcttccccaccctcgcagcctcaagccggagaacttcctggtcacggaccgcaccggcgacgcgcgcatcaagctgtctgactttgggctgtccaccttcttccgcgaggggcaggccgactttgctgacgtgctggggagcgcctattacatggcgccgggtgagggggggcggcggcagagggggggaggcacactgggggttaactttgaaccaatcccgtaaggaaacagttgcgctgcaaggagaaactgcagactgggggattgaaaggttaaggcattgggaacatgataccaacagggacaatggggagagggaggagggttggggcagcgagagcaggaggttacggtgtgagtgtgcaggttgggtggctgcagggtttggcagggctggcggtggcaggcaggggtactggtggtgtgtgtggattggaggttaccgggctgcagatgtgccctgtgtgcatgtggcctgggacaggggcccagctcacacacctctcacttgcgcctgctcacacatcagcacccacccacccacctgcttagtacttgttcccaatgtttttaaccttgcaacccatccacccggcacccgcctacgcacccacggcccacagaggtgctggagcgcagctacggcaagagctgcgacgtgtggtcgctgggcgtcatcctgcacgtgctgctgtcgggggcgccgcccttcgccggggccacggacgcggaaattatcaaggcggtgcggagcagggtgagtggccgcacctacagccttgttgtggcgggagttatgtgaagtatggttatagatcgcgcttcttttggtgggagagcatgcgaagggcgtgcatctgcccagtttgcagacgagtgcgagagggctcggttgcaccgtgaacgcccatagtcacacacacacacacacacacacacacacacacacacacacacacacacacacacacacacacacacacacacacacacacacactcatacgcacatgcacgcgcgcacgaacccccgcaggatgtggacctgtccgccaagccctggcccgccatcagccgccacgcccgccacctggtgtcgcgcatgctggagaaggaccccgagcagcgcatccaactggaccaggtgggtgggtgggtgggtgggtgggtaggtgggagggctacattcatgatgcattaagaagtgaaggagtagccagtacagcaggcgcgtcgttaccgatgtccgtgaagctcagcagccagctccagcgcgtagacccgccttcgggggcaggggggttcgcgagtggagggcagtgggaacagggtacgcgaacagttggaacaagacacagcgggcagcacactggctggttgggtttccacactagggcaggggcacgggtgaggagaaggcgggtagctgcacgagcgaggctgttgatcggagggcactcgaaaacaaggactgcgcgcgtgggttgctgagcagaggggatgtgggacgggcgagcgtgtcgcatgaacacttgcaagctgatggccttataggcagcagttttgctgctttccgttccctcatcaacgctgccgccacacgtgctggtcccgggcgcaggtgttgacacacccctggctccggttggacggcaccgcgcctgtgcgggcggttcccagtgagtaccaccgcgcgctatgagattgccattgtttgtgtgccacacatgaacggctacccacccgccaggggatgtatggttgccgctatcttgtcgcgtttccagcgtcagctgccccttgttactgttattgccgccaccctactcatcactgcttccttccttcctgccccttacctctgaaccatgacgccactccgactggcagcgggtgtgcgcgaccgcgtccgccagttccgcacgctcaacctgctcaagcgcgaggcgcgccgcgtcatggccgcctcgctgccgcccgaggaggtggcggtgagtcgcgtgtgtgtgtgtgtgtgtgtgtgtgtgtgtgtgtgtgtgtgtgtgtgtgtgttagaaagcacaaggaagacaacgtgtgtgtatgccgttggaggggtggcaggcggatgtgtatgctgggtgtgtgtgtagggtgggggctgggggcagggtgcagccaggggagcgccgcagatctttccaagctgtctccagggtatcgtgtcagggcacccggtcgcaatggggtcgcactcccctcgcggccagcgccatgcccacctcccaccccatcacgcccctcccatctttacgtgccgtatctgatcatcgctgtctgctctcgccgcgtcgccgccacacgcacgcgcagggcctcaagaacctgtttgaggagctggacgccaacgccgacgggctggtgtcgctggaggacctggtggcggggctggcgcgcaggggcgaggcactggccggcgaggaggcggcggcgctgctgcgaagtatggacctgaacggcgacggattcattgtgagtgccgggtcgtgaactcgggatcgtgccgggtcgggcggggtgtgtgactgcggtaaatgctggagatgggttgtccgcgggccagcgtgttgtgaggatgcattatgcatcagcgataagtgcaacgagatgttatacgacacatgaaaggaactgaggtgacagtttatcagacgcgcttctggcacctgcgctcttatcagatagttacatcatatcaatacccggaacaaccacagcatcgttatgcgtgtgcgtgcatgttacgccggtgctggtgcctggctgggtgcgcctttccgttgcctgtcgtcacccaagcaaccctgcggcgtatggggacagcagggacgcgggagggggggagcctgtatggatccacatgaataagaccccccacaacccgaacgaggaacggaaagcagctcccccttaaatgctttcacctcgaattgtcagcgccaatgtcagctgcgcttttgccagctgcgatcttatcaccgcaaactatcccatacgcatagtagcacatcgttttgtcaggtcaaattatcattctcaatgcgccccacctgcgcctcaactatgccccaggactaccgcgaattcgtggccgccacctacacgctgagcaagctgcagcagagcgacgtgctgctcaagaccttccgccacttcgacctggacggagacggctacatcagcaagtgagtaactgctggtgcaatgcctcggtggggtttctcacacagagtgccgccactcctcccgtgcccctacctaccctgccacgctgtcactcacccggcggtctccccccccctacgtgacatctgtaccattgctcctggctacgccctctcgtcttatttaacatgcatggaaccccctctgtcacccgctgccaccccctgctgccctctgccagggaggagctggccgccgcgctggcccagctgcccgccgccgccagctcggccgcctcagcgcgagagagcgtcacggggctgctggcggaggcggacttggacaaggtggggccctggggggcctgtgggacctgtgaaggcggccgcgtgtggccgtgcagcctccttctccgccaccttctgccgacgtcctcctccttcgccccgccgccggacgcccgcgctctccccgctctcacccttaactctgcaaccccgcctcccctgcttgtatgctgttcccaatgttgtaaccttgcaacccccgcttaaactccacgcaggacggccggctgaactaccgcgagttctgcaccatgctgctggccgcgccggggctggaggcgggaggcagcgaggcagacgccaacgcggccgaggtgcaggcggccctgcggctgtccggaattgacctggactcggcggggctgccgggagccttgaatggcaacgcagcggcggcgctgccggcctcggcggcggcggcggtggcggctgcagtggcggcgggcttccggcccgggagccacagcaccaatgacacggcgtgggacccgagcttcggcagcggcaagcgcacgagcacggggggcggggtgcgcacaagcacgggcggcggcattcgcacgagtccgagcggggtgcaggcgagcatcggcagccggccgcaggcgccgtcgccgcagcggtctgggtcgctggcggcggcaccgccgtccagctcacaggcgtcgtcgcggtcgcagcagccatcgccgatggtttcgacatcgcaaatgggcatgctgcagcagcagcagcagcagcagcagcagcagcagcagcagcagcagcagcagcagcagcagcagcactcgcgttcgcagcagcactcgcccatggtgggtggccacaggctgtcgtcggcgcagtcacagtcgcagtcgcagcagctgcggcagctgcagcaacagcagtcccgcaagcagcaggcgcaacagcaacagccacaacagccgggcgtgtgggcagacgacttcagcgacgctgggccgctggactcggaagatgaagacatcatgaaggcgtcacggcggcagccgcagcaagtgcagacgcagtcgagtcagcagtcgcatcgggcgtag

SEQ ID NO: 31 - DNA, 1325 bp, Chlamydomonas reinhardtii
atgtcggagacggagaagcggaggggtggcattatcccgttccgcattccccttcccaacccgctggcctggcggccgcccttcattccgggactgggccgccgccgcaaggaccgcaccaagcactttgcgtccaccagcgtggtcagcgtggccaccatcagcgacagcgtgctgcaggcggcgggcagcggcgcgtctgcggccgccgcaccgccgccggtcaaggtggcgctgaagcccgccagcgacgtgttcgccggcgccctggctcgcgctgcctcccagtccaccatccacccgctggacacgctcaaggtgcggctgcagaccagcagggctcgtgccgcctcggctatgccgccgccgcccggactgtccaagattgggcagctggtgccgccgccggctgcacccggcggcggcgcggttggggcgctggcccgcttcgacggtcgtgcggtgctggcgaccctgggcagcctgtacaggggcgtggtgggtgctgccagtggcgctggcatcgccattggcgcctacttcgctgtgtacggcgtggcgtgcaacaccctgtcgcgctacaccgacctaccgcccacgagtgtcgcgtttgtgggcggcggcattgcggcgctgggcagctcattcgtcaaggtgccgctggcggtgtgcatccgcagcgtgcaggcgggcgtgtaccccaacgtgtttgcggccgcccgctccatcacgtcggcggccggcccccgcggcctgtttaccggctacctgcccacggtgctggaggacgtgcccgacatggccatcaagttcgccgcgtacgagagcatgcgacaggtgtgtgcaggcgggccagccagcgtctcgtcatgcgcagcgcatactgggttgctggttgcctggcttgatacgactagcgcctgaaagatgaaacgcgggcattgctgacctcccttgcacactttctccttcctgtgctcgccctgtccgcacaggtgcaccgcgccatgaacggcggtcggaacgccagcgtgcaggaggacttcgccatgggcgccattgcaggcgcactggctgctgctgcgaccacccccctggacgtgatcaagaccaacatgatgtgcaacgccgcgggccggccctccatggcctcggctgcgtccctggtgctgcagcagggcggtccaaaggcgttcttccggggcgtgggcgcccgcgcgctgagcaacggcgtcaacagcgccgtgttctttgtgttctttgaggccatccgcggggccatcgccaaccgcgtcaagagccacccagtgcagattgagagttga

SEQ ID NO: 32 - DNA, 2850 bp, Chlamydomonas reinhardtii
atgtgtctttctttcttcgtgttggacgcggctgaagggcctcgtttcctgctcgccttcaaccgcgacgagtatttcgacaggtaagagaccctgcgcagcgctcaagaagccgctagactcgccggcgacgcggaaagaacgagtcggacgccccacggttcaattgacatggcaggcgcacgcagccgctccacgagtggtcagatggcagcggcatcatcggcggccgtgacttggagggcaaaggaacatggctgggcgtcacgcggagcggacgcgttgcatttctgaccaacctgcgcagctccgaccctgtcgccccgcacacacacgccaacccctacacacacgccagccgcggcggcattaccaccgccttcctaacgggggacgcgtcgcccgcgaattttgcgcaggtgcggaatgagtataggcataccggtttcaccgcataccggttcgaccgcacgtaattgtgtgctgctaccgacaccgcgcaagtttgccttccgctccatctgctcgtgcccaaaccataacgcccgcacacatccagcagcacttgactcgcagtttgcatcctttacgctatataaatactcttaccatatgcacacctgtcgcaataacttgtcacagtctctggacgccgcaaacttccacggttttaacctggtccttgcggaactggccgggcccgcgcccagcctggtgtacacacacaacggcgcgctggtcaccagcagcacagccgagccggccgggaactgtaaccgcagcggcggcggtggtggctgcgacgttaatggcagcaatggcccggttggggcccgcgaggatggcaaggatggcaaggagcagggcggccttgcggcggggaagcggcggctgctcggggcgtctacgttgggtgcggggtttgcggcggcgccggcagacggcgctgctgcggatgtggaggtggcgctgggacagctggccgtgacagccgccgggcagagcagtccccgggcggaggcagcaggccccggggcagcagcagcgagggattcaacctcagcaggcggcggcgcgggcagctgcactcaaggcgcagaaggcgcagcaacgagcggcagcagcagcagggtgcaggcgcttaagtcaggtgtggtgtacggtgagtcgccaccaggcccaagcggcttggagctgcccggtcacagggacgtcaccagtaccaccaccaccaccacgacttcctgcaacctgcttctttcttttgcgttctgggtctcggtgttggaataccaccaccactgccggatgccgctgccattggtgggcctggaggtggggctcatggttgtgtttgcggccgccgctgctgctgctgctgctgcgtgcaggcgtcagcaacgggctgctgctggagtggcccaaggtggccagcggcgtggcggtgctgagtcagctgctgcccgagatacggcagggtgggtgcctgggtccagggtggggagttggccggctggccgcgcgggtccattgtgcgtgtgcgtgtgcgcgtgcgtgtgcgtgtgcgtgtgcgtgtgcgtgtgcgtgtgcatgctgtttcggcatgtttcatcgcgtggtggcaatgcagcacatgtgtctcttgctcggcgccagccccagctgcggcacaagctgccacacctacccacccaccccgccctgcaggccagccggtgccctggtcccgcctgttcattgagctgctgggggacgacacccgactggtgccgcccagctgcggccggcagcaggagggggcggcggaggaggcgggggcgcagcaccagggagccagcacaggtggcatcagcggcggcggcgtggccgcagcccaggtgagccgtgagggctggctgacccctagctggctgacccctagctggctgaccccctagctgactgggcgggtggctagacgactaggtaacggggcccctggctggatgggttggtgggtgggcccctggctgggtgggtgggtggacagctgggcaggctggcaggcacctctacacccctacacgccccacgtccgcggcgcaccaaccggctcatcagattctcaattgctcgtatcccaatacgacacccagcaacaggccgtggccccggctgacgaggtcgccgcgcacgtcggcagcggcgccgcagtgcacgtggacggccgacccatcgcaccagcaccggccggcgctggcgccggcgccggtgccggccacaaccgcggccacggccatggccacggcagcaatagcagcagcagcagcagcggctgtagcaatggagctggcgggaatggcggcggctgtagcagcgctgctggcggcggcggcgggggcggcggcggcgcgggtgacagctactttgagagggagctggagcacatcacgagcggccgctttgtggcggaggtggactcaccggtgggtgtggcagcgggacagtggggcagcagcgttaacagtgtttaaagcgttagcgtgcaggtcagggcaggtgacaagtacggtaataggttgttcagagttgtctggccatagcaagcacacggacagccccacacctgcccctcttagccgcaatccccggcccctgtgggtctctgctgcttggggcttggaactgactactacccgtactccttccctcccccgacctctgacttttgcacagtttggcaagtacggcactcggtcgcagacggcgttggtggtgtggctggacgggcgtgtggagatgcgggagcgggcgcgggagcccgacggcagctggcgcgagagcgcgctggacttcgccatttcgctgtag

SEQ ID NO: 33 - DNA, 994 bp, Chlamydomonas reinhardtii
atgtcttacttcgcacgatttacgcaggtaagcacccggccaatgcgaccaccagcgcctgggcgcagcgttttcggagatgtgcgctgaccgctatgtcgcatcgcaccgcaggcctcgtcgatgcggcatgcggcagctgcctggcgcgcaggtaagacacacaatcaaacccacgtcgctgaccttcgtcgcgcgggtgcagttctggggccctcggcgccgactggtgtgtggcacaccccacggccttgcacctgggcaaagctcgctcgtcgccagcctcctgcagcacgtgcgcacccccctccccgatcgctaggccttccacacaacctccctcacccaccgcctgtcaccgtaccaccaccaccaccattacccccaaacaggcgcgacgcagatgcatgcggcgcgtgtggcgatggccgcctcacagcggctggcgggcgggcccgtgttctccgcgccgccgccgccgccgcccagccccgcggccggcttctccagcagccccgccatgggcacctccttcgcggcctcgggccttctgggcagctccggcggcgcctgtgagtggctgggagggagggagggggtctggggcgcgtgtgggagggagggcctggggcgcgtatgggatggggtcaggcgtcggggcgggggggctgtggagtctgggagctactggcgggggccacagggggcggggggccggaccgagcgcagccgggttcctgggcttgatggtttggggggtcgcatgtcgtgactgtgtgtgtgaagcagggctacctcgaagcctagcgagcctgtctctgtgtgcgttgacctgctgtgtccgcgcgcgtcctggttttcccccgcccctgcagccacggccttggagggcagcgacggcactggagagggtaacagcctaggcggcgcctcccataaagaggccgttctagcggttacaaagcgatgtaggaaacgacgcaaacgcttttag

SEQ ID NO: 34 - DNA, 3855 bp, Chlamydomonas reinhardtii
atggtgagcagcgcaccatttcttttggcacttgtccccggctcatagtagtgacatgcaaagcgaacagtaataatacataaacacttatcattcgtagccgtccgccttctgggcatagcctctctgactctagcccgcccttcccttcacggtttacaggcgagtggaagctatgtaagccgctcaccgacaaccggcgcagccagctgggacgcgcccatgcactgccacacgccgagagcttcctgcagggccctggttggcccaaggagctcgaggacgcggccattgtgcaggtcagcggtgtgatgggccgccgtaagacgccgtaccgcaccgtacggtaccttgaccagagtccattgtgcatttgtgagcaggatctttgctactgtacgtagtcaataagttgtagggtgggaagcggaggcccgtcaaccaagtcttgttggcgtgctaccccccacgcaggccttcacccgctgccaccactccgaccccgaggccttctccatccccctgtacgccgcgggcgacgacaactccaagattgtggcacaggtgcgaacaagcacaacagactgcagcagcatgacataactccccgcccttctcgcccgcctctccactcccacccgtcggctctggccctcgtatgtcgtaacccccttcccttcccccgcaccccaggccttcggccgcgcccatacccatggcgccgtcgtgctcctgggctacagctggcgcgacggcccgcagcccggctggggcgatctgctcgcaaagctggtcaccgacttcgctgacggcgcctacacagcccacgccgccggccgcttcacgactgtggctgccgccaccgcctcctcccacgacgcggcggacgcggctgacatgggcagcgacggcaccgacaacaactcgccgtacgacttggactcgtcctacagccaggatctggatctggattcggtgctggagggcgctggcggcctgtccgacgaggcggcggaggtggtgcgccgcttcttgaccgccaccatgggataccctggctacccgggttacccgggttacccgggttacccgggctacccgggttaccctggcgtgccggcctaccccccgcccatctacatctcgccaccggtgggtgcggcagggggcttccggcagggcgggggcgcgttgtgagggaaaatggggatcggtggacacgtgagggactccatggggactgaggggcaaggcgaggtgccgggcccgctgcgtacgggaggaagggctctggagggggcgttgaggttgtttgaaatgcggttggcggcaatgaaatgatgctggggttgtatgaacaacaactggtccctgccagagacacggtttgatggtacccaatgtgctctctccctccgtgcagcctgccgtgctggactcgcccccgcccgccactgcgccatcgccttcgcccgcggagtcttccccgtctccttcaccctctccttccccttcgccctcgcccgtctacccctctccttccccttcgccctcgcccgtctacccctctccttccccttcgccctcgcccgtctacccctctccttctccttcgccctcgcccgtctaccccactccttctccttcgccctcgcccgtctacccctctccttctccttcgccctcgcccgtctacccctctccttctccctcgccctcgcccgtcgacccctctccttccccttcgccctcacccatcgacccctctccttccccctcgccctcgcccgtcgaccccgctccttccccctcgccctcacccgtcgacccctctccttccccttcgcccgtcgacccctcgccctctccttccccctcgccctctccctcgcccgtcgacccctcgccttccccctcgccccccgtgtacgccccgccgccctcgcccgcaccccctgcgcccgcccgtgttctgttcatggattttgccaacctccccgccactggtgtgcaggcacccaccaggtaggccgggcttgtatttgtgaagtgtatgtgtggtgtctccaaaccggacatgtgtgtgtgtgggggggggtggagcatgcggcgcgggctgagctgtatggcgagtcagcaacacaccaggcgtggcacgcggcactcgcaatacacatccgtgtgttacagagcacaaggatgaataagcgcaaaggccgcacgcaatgcagcaaaacgacagcaaacggatgtcgtgaaatgacctcgtgcgcgcgcgcgtgtgtgtgtgtgtgcacgacaggccggtggtgtggtacgacgatcccgacttcgacagcctgctggccgccagccccaacaacagcaagctgtggatggtgggtgtggggtcgggacttgggagggaagggaggagagggcgtgcgggtggttttgtgggatgcgcgaagccaggactggagagggggaggggcgcggggtaggtggcatgcgcccgcaagccggcgggatgcgtgctgcggtgcgtatggggctgctgggtgatggcagctagcggcggctaggctgggggtgtgccagctcgagtggcgcccatcaaggccagggcctgagccgcgttctgcgcgctgtgccgctgccgctactgcccttgctccccgcaggtgaagccggaccgggagccgtgtgttggctgcggccagtgcccccgggcctggtaccccaccaacaccaggtgaggggcggcagcgagcgcacttgcatgtggtcatggtgtggggtaataacgtcgggatctgcggagtgggctcgccgtaccaacccgcctccgctccatcctgtcactcccacatgcacacgccgagtctcccattttttgcttagtagcattattaacacacagttaattcgtctcttgcactgcccgcccgacagcgacaccaccaacggcttcaactacaccaccattgtggtttacttccgtgagccaatgctcatcaagagcgtgcgcctgaacgaggtctaccagccgggcggcgtgcagcaggtgggtgcagagggcatctgcacggccgctcagggagttacagcaacacggctaccaagccacctgacacccccgccctgacgcctccctcaaccccaacctctgcacctaaccccgcccccctcctcttcgtttgtcgccaaccccgcaaacagatcttcctgctgcagtggcccgccgtgcccgtgccgctcgtcttccccaacgccaccgcactcggccccgagtccgtcaagaagcaagacattgtgttcaacggccccgacacgaccaagacctgcccgggcgtgctgaatgtcgacgtgggcgtccagcgctccgcaatgaaggcacctgtgcgcaagggcttcacgcagaagcgcctgcagcgcggcctcaagaagcgtgccgtgggcggtgtgggaatcaccgtggcgctgccgctcccgagcgggccaggcggcagcaatggcaacggtaacggcaatggcaacggtcacgacaatggcaacaacggcaacggctggggcgcgcgccggcagctgcgcgccgctggcggcaacggcaacggcaacagtggtggtaatggcaacggcaacggcggcggtaatggcaacggtggcggtaacggcaacggcaacggcggtggtaatggcaacggtggcggtaatggcaacggcaacggcggcgatgactgggagcagctgctgacgactttcatcggtgacattcgcttcgatgggcgcgttctgtatcctcaggacccctcgatcttcgtgccttacgcgccgcccaagccgtacaacaagaagctcaagaacacggcgtaa

SEQ ID NO: 35 - DNA, 3779 bp, Chlamydomonas reinhardtii
atgtatgagcttggtcttgatatcgatggcaagccggcccatccggctgcaaccattgtgagcggcgacgactcgtcgctcgatggcatcgctctgagccgcgcgacgacaggtggtctgcttattgtggttggaagccctgccaaccttcataaaaccattggggcggcctttgatgtcggtgagtttgataaatgagcgaagggaaggcgaccaggcgcattcagcatccaacttcgcactgagccttaacaacgccggcagccatagctctgtaatcttaagcgcgctcttatggccgttgtatgcaatgagcatgtttcattgagcagccgccctacctaactccttggtgcgatcccatccttcaggctcggatggtcgccgctgcgactctacgtccaacggtggctcggtcacccacggcagcaggccgaggctgcacgctgccgccgctacgctcttcggctccgaggacgctctggatgcggagtggccccagacactcgaggcggtcgcggtcacgcactccattgccgcatgcaacgtcggcggcgccgtgacgcaggtcccgctttacttctcgcccagcgatggaagcatcgtggcggtggtgagttgcatggcacttgtctacacgttgtgtcaaagcagccgattgcgtcaattagtcctgtcttgcgtatttgggtcccgtcaccaacttgcttattagtcatcagggacacgctccccggcctccctcatctcacctccaccacccctcccctctcctcccctccaggccttcacctccgcctccccccgcaagcgcaccgtggtgtggctcggctacgactgggcggctgggcctcagacggcctggggtgccgtgctggccaaactcatcgacacgcacgccctgctgaccgccacctcctcggcggccgctgcctccctgtcctccgcatcctccgccactgccggagagcccaaggtcgtgcacatcaccaccacttcctcgtccgccgccgcctccaacaccggctgcggtagcggaacctgttcccacagccacctagtcatggccaccctggccgctgccgcttcgtcttccgccgcatccgcctctgccgcttcgtcttcagcctctacccttgcgcacaccggcggctccgagaccgagttcgcggctgatgcagccaaggatggtgatgacgctgccgcggagcccgtgttggtggatgacgcagccatggatgccgccctggactccatgccggatgctgtcagcgatctgtcagacggcgtcagcgaagtggtccgccgcatgatggcggccacaaccggcgccggcacgtacccggccccgccctccccggagcccgcctccccggcgcccccctccccggcgcccctgacgcccgcgccgccctcccctcggccgcccaagccccggaagtccccgccctcgccccccaccacgccgccccccctggcgcccccctcgcctccctcgccgcccgccccgccctcgccgccgcccccgctgccccccgggcttgctgccgaggtccagggttacaactccgacacgagcgccccgccgggcttcaacatcagcgacacactgtcggtgcagaacttcagccgcgacttctgtgagaatgtcaccagggccctggacccgcgcccggatgaggtgagccgagcactgacgtcgtagactcaatctaccacccggcacccaagtgacccaacctaaatgactcttgcccctgctcgctcgctcgctcgctcgctcgctcgctcgcagtgtgtggtgttcgacatcaagagccacggcggcgccacgcatcaccaccgcctgctgagcgaggcgggcgcgctgcgtgtgtggggccccgaggacctggcagcggagcacccggccctggccgccgccggcatgagccgcctggtgcacctgcgcacctacagcgtgggcgaggcggagctggcggcggtgagtctaccgcctgagcgcatgagcctgccttgtggtgtagatgacttgtgttgtggaggtttggcaccgtgacatgtgtgtgtgtgtgtgtgtgtgtgtgtgtgtgtgtgtgtgtgcatgctagctggctggggaggcagcggtttctccgtgaagtttcaagtgccttccgcagcgacggcggataggtggctcgtgcatcatgcgttaggaccggcgccgccaccactactcatcaccacgccacggcacaccaagacctgtgcttactccctagtccccatgcccctcgcccctcgcccctcgccttcctacctgcaggtgcgcgcctgggacctgtccgtgtcgctccccgtcaccgccctgccctcctcggtgggcggccgccgcagcctgcagcaaagcacccagaccatcaccctcgccttcgtggtcatctacctagtggaggtgcccctgccgccctcgccgccgccgcgggcgcccaacccgcccggcgtcatggagccgccctcgccgccgccctcgccgcccgccgcgccgccgcacccgccgcgctcgcctccgcggcctcccgtcaacctcaccgctcttgcctcagccgtgggcgccagcgcagtgtaccaggtcttcccgccgccgccctcgccgccctcaccgccctcgcccatgccacccagcccgccgccctcaccgcacccgccgccgctgccgctggcggaccgcatcacgtccgtccgtttctcccgcatggaggccgcgggcgcgcttggcagcaacaagtgagtcgctccggtgtgattctgatacattctgcacgcggctgcatgagcgtcgtgcccggcacactcagtcgcgtatatacacctgtgccgtctctgcgcatatacacacataaacacataaaggcacaacatgcggccgcacgcgcaccggatcggacccagcatgcgcactcaacacgcttcgctccctgtccctgtccctgctgccgctgtcaacaggcgtgtggtgtggtggaccgacggtgactttgagtcccagcgcaaggccgtgtggaacagcccgctcaacctggtgtggcgcggcaaggccgcctgcggcaagtgcggcgcctgcggccgcgcctggaagccgcgcggcgacaagttctcggtgcagctgtttttccgcgagccggtgcagcttgatgagatccgcatccgccaagtgtggcatgccggcgtcacggaggtgagcgcaggggttactcagctagggtggtgattgcgcgcgatgctagcttgttacttgctcattccccaacggtgcccttggtggtggctgacgagaatcttggcagcgtagcgctcgtcctcaacctgacacctcttccgccgcgcgccccgctcctcgcccgctctatctatcgtaggtgcggctgttggcttggccggccgtggacgccgtgaaccgcgtctccgacgtcttcctgggcgagccggtgctgcgccagaccgccgacaacaccacctgcaacacctggctcacggtagccatcccgcaggagcgcgccggcaccaaccagaccgtgcggcccatcggctcacaggacgccattccgccgaaactgcgcagcagcactgtgggcggcgtggtgatcaccacacgcacggcggccacggttcgtgccggcacctggatcgacgccgtggatttcagcgggcgtgtgctctatcccaacgacccggctgcgtatgccgcgtatgcgccgggcacgggtggcggtgcgaccattgggcgccggcggtag

SEQ ID NO: 36 - DNA, 3851 bp, Chlamydomonas reinhardtii
atggcgagcctggagcgcgtggcgagccaccgggctgcctcttgctcacaaatcattagcccagttcgttttggacgctggcagagcgtagtgcacgtctcgcggttggaccggcgtgtggccctgccctctcgcgtgctagtctccgcagcagctgctgatgtaccccagcaaggagcacccattacttcttctaccccttatgttcctactgcacatcaatcgattgacgaggacaacgtgttgacttcgttcattgccgagacgctcttgcccactcgccacgggaaatttcggctccgtggctacaagcattcggtaggtgttgaggacttccgcggcccatttagttgtcgttgctgcacgcgcacgagggtttaggcctgcgattgatcgtttggcgtgcccacgcagacggatggcggggcgaccttcaccgagcctaccgcgattgtgtccggcaaggttgaggggcaggaagacgtgagtttgggtcggggtcaagaaaaagggctgacgtggtgacgcgcgaatgttacgcgtctcgacgcacggacttcgcctcagcctgccagcacacgctcgcacagtgtagtgacaattgttcatgctgcgtacatcttgctgtaggtggcggtgcgcgtgcatgacgcctgcttcacgtcaggtaaggggcgcgacaacgtgcaggaccaacgtgcgagatggtgccactccgccagccccagccagcaactccattagctgtcccgctgggcacacatgtgcccgctcctgcactgcatcctccaccccagtttcgtcctcattctagctttagactgcacgtcccgcccgcctacccagcctcccctaccacttgctgtgcctaacatgctcttgacctcctcgtctttctgtgtggcctcctgtccacagaggtgctgggctcgctcaagtgcgactgcgcggagcaactggagctggcgctgcgcatgatccagggcgcgccgcccggcattgtgatttacctgcagcaggagggccgcggcatcggcctggccaacaagatcgccgcttactccttgcaggtgtgtgaacatttgtgcgtattggtgaaagcggctcgtgcgtggctgcagccgtgagccagctggaggatagtgcgagacagcgcgcagtagtggggcgtgggcaagccatgaggatggtatgtatgcgacgttacaggagggatacgcaggagcggtatgtgaatttccaaatgttgacgtctgttgggctgggctaggctgagttcgtgggctggactcaagacacggcatttcgccacggcggcaccccgggctgtacagcgggtcctgctactcgagacagtaccgagcgtacatacaaacatgcagtcaatccttttccctttcctctggttctcccagaagcgcccaacctgcctccggctgtgccatgctgacatgcacgctgccctctcgcaacaccgcccgcaggagcaaggcctggatacggtggacgccaaccgggcgctggggctgccggacgactgccgcgagtacacctcggtgcgcaacatgcttcaggacatgggcgtcaagagcatccggctcatcgtgagtggggcgcgggatgggcggggcggagggggcgagtggccggccggtgggacagctagtagggtggggcggagtggaggggcgagtggccggtggggcggctggtggggtggggcgattggggagtacgcggggttgcggagtgactgagatgttaggaagcgcgctggcagccgccgcatttgtgtgcgtgtggagcgggtgcggttggcggcgcaaagcggccagggggtgtgggaggggaggctaacatgcggtgtggcaggtggcaggcaaacgtggtgacctacgcttatcatggagggatgagggcactcgggcgcgcgcacggcatgggctctgtggatggccaccgtttggttgaactgtaagcaccagcagcacggcttgcactgcggaggaacagcatcgggcccattttgattgcctcaggccgtcaggccaggatcaccttggcctcggtcctctcgcctctcggtctcaaaccctgaaaatgcgcccgctctctcggctaccgcaacctgcatgcgtgcgccagtttggccccatgttgaagccagtcctcgtaaccacccaccccggcccccagtcctgacactccgcgcctgacactccgcgccacgccgcgccgcgcagaccaacaacccgcgcaagatcaacacgctcaccaagctgggcatccaggtcaacggccgcatcccctgcctggtggcggcgggtgcgtacaaccaggtgcgcgcggcacagcatgcgggcgggcggggcgattgcggggcggtcgcggaaggagcgggtgccgggggcggggctggccaatgcggtaaaggcgagatgaggcgaggagtgggctctgacgcacggctttaacgcctcacgtgtcattattttgtgtccacagccaacacaccaccagaatcaccaattatgccacccatgcaacaaactgtcaacatcatcttggcttatttcatcatgcatagaatcccacccatgcgccaccaccccaaccgccacaaccgcctctgccgcctcagggctacctcgaggccaagcgcgaccgcatggctcacatgctgcccgaggaggaggcgctgggcagctcgctgggcggacccgagccggcggcggcggcggcgcagcgccccaacggcgcgggtgtggaggcgggtgagctcaacggcgacttctgcttctgggaccacagcggcgagcccacgcaggtgagaggcgggagaggctgggtgggtgggtgggtgggtgggtgctggagcaggggcgcgggttggggggcgcaggggctggagagggcaggggctgagggacgcagaggcggcgggggcaaacgggcaggcatggagggggtggcgggaggaaggcgtgaaggcaggggcgcggcgcgtgttgtttgcggcgtacgttcgtgtgtcgcggcagggcggggtgggccacgtgtgttcgcatgtcgcgagtgcagacgcacacacgcacacgcgcactcacgcaggaacgggacatgacggggcaggtggcgcgtgacgggagtggatcgcggggcgggcggcgcagtaccggcggtagcacaagcggcacaagtaccggaggtagcagcagcacgggcgccacgcccacattgcaggggcctcctgcggcgcggcgggcgcaggtgccgcggcagcgcccgcgggaggccgtggcagtgcgttcgatggccgatgactctagcggcgcaggcagcagcagcggcggtgcggccggtggcgcagcggcggcgcgggactcgtgatttaccctaggcatgaagattgctgaccgcgagaggcacctatctttaaggtacctccagcatgcacatggaaggtgtttaggaaacctgcgcggtgatgtgcatcgtggtgctgcggatcgtgacgcgttgtacacgcgtctgcacctcagcgctcgagagtcgcggccctgcagcattttggcaatgcggagtgcgaatcgacagtaaagcgcgcaccgtatccacatgcacattccgcaatacgcttgtctgggtccccgcggccgcttcctgaactgtgtggtgcctatcgccgccgctgtgccccctgtgtgctctcacaggctgtcgctacggtgtacgccaagggtggtatggacctgccgcaggggctagcacatggcgacaacgggcgtgtggtgccggtggcggcagcgcccgcgggcagcagcagcggcagcgatgcgggctcgtcgtga

SEQ ID NO: 37 - DNA, 981 bp, Chlamydomonas reinhardtii
atggcggagctgcacgtcatcgggcaaatccagggtgctatcggcttccccagccagaacctgttctgcaaggtatggccatgcggtaggctattttgacaacaaggggcgcaggggtatcggggagtggttcgtggcacgcagtgggctaagcctgccacggtccgcggcagcacattcgacgacctcgtcccttgactgacccctgctgcaattgcttgcgataccctagtggggagtcgctgcagggcgaagctgggagctactagagggtttggactctgggcagacgcaactcgacctggcaccagagggggagccggtcgtgtgggcccatccacttgacctccactacgcatgtcgcggcctagccggctggccaaagctatacttccaagtctggagccaggacgtacatggccgaaatgacatatgtaagttgcgccgctggttggcacttactctgaggtcaaacatatggtggcagtcccattgctcagtgacacttttccacgtcgggggcacaggcgggtacggcttttgccacgtgccgacggcgccggggcaatacgagattgaatgccccacgtggataccggaggtgagcgtaccaccttcgggcgtatgcagggatgcttggtgcagctgtcctgcctgcaccagcactacctatatgcgcgcggctcgtggttgggctcgggtcatgacggcaccaggctgggtcctctgctccctgtgaccctaaaccggccctaatcttaattccccatttctcccaaacccatctgtctctgtcagggcactgcgggcgagcgcattgcggcgttcttcctgggcggcaatccccggctcaagtacgaggaggtggtgtacacgcccggagatcgcttccgcctcaacaccgtgtcggcggggttggtgcaggtgcagctgggcgtcattgtcaaggactttgagcgcaaccacgtgcactttgggtga

SEQ ID NO: 38 - DNA, 4277 bp, Chlamydomonas reinhardtii
atgcttcacatcctagagaagacagaggaggggcgtaacgctctgcaggtgagaccgccttggacgtctgacagtcgtgggggcgaacccagcccacaactgccagacacgccgcaccagcgcggttcgtagcggtgcgaagagcccctgacaagcccaacccacatcatgtttctgcaaccacacaccagacacgaatccctcatcccccaaagtgaactgaagggggccctctttgtcctgctgccgcaataccccttattgtgtgtcctcaggagatgctggggccgcttcagcacctgcaatacctgcagcgcacagttcggcagcacgagttggatctcgactcgctcagccgaaatgtagacgagcggccctgggacccctacacagcctttgggctgcgctaccacccgccccacagcggcagcggcagcagcagcagcagctcgccgcaacgggcgcccagcaagcacgccagcaacaaacaccaccacaagtcggggtcgggttctacacacggcagcttcgccgcagctgccgcggcagccaatgcggcggcggaggcggcgaaggtggcggcggacgtggcggcggagatggcggcacgcggtcgcgccctgcacaaggcagaggcggcggacgtggcttcagggggtgacggcagtagcaagagtgatgcaagcggcagtagcagcaataacagagagggtcagaagagcggcggaaaggacagcagtaaaagcagcagtagcagcagcagcagcagcagcagcagtggtagtggcgggacgagccacagctacccgcgcttgaggcttagagaaaaggtgcggcgtgtgcggtgccgtggcgagggcgacgggatgtggggctggggttggaaaagaggcgaagcggaaagcagctggttgcggcgggcgcagatgggtaggtggcaaattcactgcagtatatgaggtgtttgccgaacaagggctgggccgtttgatggccagcaaaacggtatgtgtgttgtatgtggggtgggggttggggtgggggtgcgcaacggtggggctcgggaactgtgcattggctaccatacccagtactcacgcagatatgacgtcatcgctcctgacaggtggtgcgaggcagcaagcacccggaggagctgcaggtgcgacacagggggccgggggctgcgggaccaggggttggggtttggggtttggggagaaacttgtttttgttgttcgtggtgaaggtctggcggtggcatcgcgtcatggcggcatttgctcggtcccacaaagctgggcatgctatggaggtgccgctgtgatcgatgtacaacgcgcgtgtctgtgcagactgagctgacacggcgcaaggaggcggtggcggcggaggcggaggcgctacagcccagagtgggggccatgctggagcggctcagggtgcgtgtcagcgtgtgccttttggtatgcatgtgtggcggtgtgggtgcagcgccttgcggcgtggggggttggcaatgcgcaccagcggcggcctcgcctgcccctgacacatatctgacataacacacgcaaacgcactcaaccacagggcttgctgcaggccgcggccaacagcagcggcctcgtgccaggcaacgcaactgcagaaacgcaactagcagcaggcgccggcaccgccgccggcgaccccaacgacattgttgcggatcccaacgacctggatctgtacgagctgctactgccgcgctgcgtcctggcgcgcctggatccaatcaactatgtgtcgtacccggcgcggcccttcgtgtccatcgtactgtcgtactcgggccggcggctgccgcacgttctgtacgaggttgcggagccgttgttggcgtgcgccgccggaagggacctgccgccgtggcctggtccggaggacggcagtggcggcggcggcggtgtcggcggcggcggtgctgccgccgccggggatggtagtagtggtggcggcggcggcgcggctggtggcaaagggccgttgaacgagccagtgtttttgccactgcctttagagatcctagtggcatttgacgaggtcagtgaggcggcgggctgggcggcggcggcggcggacagcggtggccgcatcatcccggtcttccggcccggcgtggcagacgtcagcgtcagtggcagtagcaacggcactagcggcagtagcaagactggcagcagcagcaacaggggcacaggccggagtgctgggagtccgccgccgctggtgcactgggccaatcgggtggcgcaactggctcagggcgagatactggtggtggtgcaggtgcgggcgcgatgcaaggtcttaggcagtgcgggaggtcgggtgcgagaaagggaggggttgaggggcggtagctgcgacaaagcccagagcacctcgagctgcttgcatgtttgccgcgtgttcgctgcacgctggcgtcgcgtcaccctgtgcattcatcacacaatctggcgccgcacgctcgttgtcgtctgcggctcacaggacggcgactcgctcctctcgccgcttggtcccgagggtgctagcggtggcaccggcagtagcaccagcgcgcgtgtgtgctcctggctgcacgtggcgctgcggacttttgaggcctggccgcagctgggcgcgctgggctcgggcgcctacgtcatggactggcaccccgccgccatcaaccggggacagcacttctggtgagggcgggcggcgggcggcgggcaggggtttgcagtgggaacgcagggaggttgcagtgggaagggaggttgcagtgggaaggcagggagggtgcaggtacgggtgggtggagcgggattgcccgggtcagcaacgcacctggcgggcgcatactgcccgtggtccctgtggtccatgggccaagtgcactgccagcagccaaccccaaaggctacagcacagtccgcgctctgcagtctgcactcctttcaatctctctggttctttgccgttgctgcaagtcttgcatgcctacaacttgcggccgccacagggataaggagcggcggctgccgctgcaatttgtggccgcggcactggccacgccgcaggcggcggagccgcgaggcggcgccgagctgccggcggcaccggtggccgtaaggcgggcggcgtggaggcagctcgggggcttggacgcggggctgggggctgccgctgcgtgtggcgcgtgtgcatggctggacctgtccacacgcctgtggctgggtggctggcaggtgcgcgtgggcggtgcatggagtgcacggggtgcaatggggcacggggctggtgaatgcttgcatgtcatgcgccttattgacgaacgcccttgcaccgttgaactgtattctgtattcctgcttaccagcaactccccactgctcgataccgtatgttcttctaatccacaggtggcgcagctgcccctagacctgggcagttcctcgcctgctgccaattcgctgctgctgcccctggacgcccagaggcgcaacctgctcactgcggccgcccccgcgcccgacgcatccgggccagcgcaccggggcacagcagcagtggctgcggagggcgtcggcgacgccgaggcccgggctgggtccaggggccacggcgccggtggtgctggtgcaccggaggccgcggcgtggccccgcagcttggcggcaacaggcgtggcgccagcgggctgggtagcagaggatgtggcgtggtgtgagcggccggagctggcggcgcaccggggccggctggagggcgtgtgcgcgcggctgctgcagctgcggtacggcgcctcgccgtactggcacgacggggcggtcggcccgggcaatgaggatgcaacggctcagggtgagcagcgggctgctgctgctgctgctggggctgcgggcagcattggcggcagtagctttgaagcgggtgagctagggacagggaaagggacagcggctgggataccgactgccgctcgcgcggttgtcggggccgaggaggctggagcggaggacggtgcggagcccggcccgcagggtcggcggagcttgggctcaaggagggcgggctggccggcggcctggttcctgggcagtgacgtgcacgtgcttgtcacggagcaggtgaggcagctgaacctgctgtcgcccctgttccccctgcttgggtggccgggcttgggctccgcctgccctttcggtgcggctggatgccatgagccgcacgcaactgtttaa

SEQ ID NO: 39 - DNA, 5513 bp, Chlamydomonas reinhardtii
atgggcaagcgacggcgtgaggacgctgaggctgaagagcctgcagctgaagccgcggagccgcagcctgaggatgtggccgccgatactggcggcgcggcgcaggacgccggcgcctacgagggcggcgaggagggtgagggaggccgttatggacgccgcaatcggtcgcaagttaatcccgagacattgacgtacctggaggaggtcgtcggccatttccaaaccctggtcgacgatgaggagcgatcgctgctcgtcggcaacgtgcttgacgagctggcaggcaaggaggtcaaggtcggcagcgacccagtgtgcagccgtcacgtggagacgcttatggcttcggcacaagcggggcagctgctgcgcttcctgacctccgtgtcggacgtcgacggcctgttcacgcttgtaagcaagtgagtgagtaccgcaagggctatctcgcgtcagtgacttgagataggagggaagatagcttgtgtgggaagatcaagaggatgcggtgacgggcacgtaagcggtggcccaaacccggccgccgccccacacctcaacgtgacacccctctcagaccccttccccctgcctcctgacgccacgcaccgcgcctgcagccccttcggctcccacgtggtcgagaagctgctggtgcgagtggagagccagctggacggcatgagcagtgaggagtacgacgagtttgtgcgggtgagtcgcacccgggccctgccagtgccctgtgccaggtggcgtgcagggctgcagggctgtgcgcggcgccaagcacttcgcgcgaccgggctgctattacctgctatccctatcgtggatctagttgctcacgtcgttgtcatggacggttttccctgtgcccggttcctcttaccccgccttccccgtgtcgccgtcgcctgaccaccttatccatgcctgcacctccgcccccctccccaccaccgtacaggtgatgacgctgctggtcgacgcaatctgcccgcatctgtacgactacgccaccgaccgcttcgccacgcacgttgtgcgccgcctgctgtgcctggcggcggggcgcaacgtcctgccgcccgccggcaagcccaagggcaagcagcagcaggaccagtcgctgccggggctggagaacaaggtgagagggctcggtgaggggcgcatgtgtgccaggaggggcgggaggtgagtggtgtaggaggaggtgatgaggcggactttgggcggaggcgacgtggctagcactgcgtggtgagcggcacatggccagtgggatgcaccgccctgcaagtgcgtttgcttgaactacttgtcctgccttcaagctgaccctgaaggtcgtgtgcatgctgaccaaatcccaccccagcggcgcaaaggcgaggtgctgggcgggctcgctgccaagctgggacccggcaccggcggctcgggcggcggcggcggccacggtgggcatggcagcaaggcggcggcgatggcggcggagctgctgggggcgggtgcggacgaggctccaccggcgcggttgccggagctggtgtccaagctggttggcgcggcctgcagcgacgacctggtgggggcggccatgggcgagatggtgtaccacccctacgcctgcccgctgctgcaggcgctgctgcgcgcggccgcaagcgaccggtgagacgaggcgaggcgtggggcggcgatgtggggcgtgcggcggcgaggcgttctgtgtatgggggtgattgtgtggagtgcagggcagggagcacgcgtcccataattatgtgtgtgcgtgtgcgtgtgtgtgagagagagtgattgcgtgctctcacttgccttccatctcccggtctccccatcttcttcgtgcccctcttttgcctgtcctgctgccctgcagcaagctgctccgcgggctggtgcctgtgctgctgggcgcaaccgccttcaacgacagcgccaagggcggcgcgggggcggtgctggagggctgccgggacgaggaggtggcggcgctgtttgtggaccccaccgcctcacacctggtggaggcgctgctgcaggtgcgtgtgtttggggttcttgtgtgggatgtgtgtttaggcgtgtgtgtgtgcgtgtaggcactgcatgcatgccacgacagtaatgctggccatgattgtaatttgcctactcgataacccatgagcttcaagtagattgagtctaatactgagccacgcattcgacggtcaacgcatctgtttgaatcatacgcactgcaccattcagcatgttgagacatggcgttggcgttggttgggtatggcgaggatgatttttgcctactcgataacccatgagttttaagtagattgagtctaattctgagccttattccgccaaccgccaaatgcaattacaaacgcataccgagttacaacatgcatgcacacacacgcacgcacgcgcgcacacgcacacacgcacactgcatcggtctagcctccccctgtcctatactccatgccccgtctcatcatctctaacctccaaaccacaattcgaattcaaacctgcaacaccaggttctgcccaagtccatggcggaggagttcatcaagcgcttcatgacgccgcgtcttgccgacctggcgcaccacccctcggctaatttcacgctgcaggccgcgctggcggcggcgcccagcaaggacatggtgagcggcttggccccttgcgcgagatcgagtacatttcggctctgactgtgtagttcgcgtgcccatatcatcgacgcccatgaccatgtgtcaagacccacaaccaagcaccaaaccacttcgtccaaccacctctcacaaacccccttacaaccacccccgcgcaggccaaggcgttgtatgagggcctgtccggcctgctgcccgacctgctgcgcaagcgccgcagcggcgtggtggcggcgctggcggcctgcctgggccggcacggcgtgtgccagcgggagctgtgcacggcgctgggctcggcgctggcggggctgccgcaatgggcacacctcaagggtgaggggggtggccgcgggtgaaggggggggcgggatgtggaggcggcttggataccggtacttggattctggtgctcagcaccgcaggcaggctggtgtgcgtcttcccactcggttgctctttgccgtgcgcctttgtgggcctttttgcacacaacaacgaaatggctcggtatcgtactcccttgtcccatacagtggtcaagggagttggttaaccgcgcaatataatctcattttcacaccacattgccgcttctccggcacagcgtacgcgtgacacacgccgctacgtatcctaaccctagtcatccaccgctcagtgccccaccttcgctcattcacccatcctcctcacagcctctctcccccacctccaccgcccacacctcctccttccccacctcctccacctcgcaggcgacgccgcgctggctcccgccttgctctgcctggactcggtggcggtggtgggcgccaacgagcccttcgccggcgcgctggcggccggcagcggcggcgacaaccgcgcgccgcggctttcggcagtgggctgcagcatcctgatccaggtgctgcgctacggccagggcgcatgccgcgccttcacagacagcgtggcggggctgcagccgtacgacgccgcccggtgagtgcttcggttggtcagggtgagggcctgaagggccgcctccccgcacaaacctgtgattaaactactccgtggacggctgccctcattcgtcttgcgtggacggctaccctcacctctctctcgcgcgcacacgcacacacgcatatccattccttcctcagtgccttttccaacacgctttttccaacacgctttttccaacacgcttttccaacaagcgctctctctcttatcacagggtgggcgccgaccccagcggcagccgcgtgctggaggcgctgctggagggcaacgcgcctgccaaggttaaggcgggcctgctggcgcggctggcgggccactgggagctggtggccagcaccggctcgggcagcttcctggtggaggcagcctaccgctccgcggtgaggaaagaggggagagcaagtgctctgtgtgtgtgtgtgtgtgtgtgtgtgtgtgtgtgtgtgtgtgtgtgtgtgtgtgtgtgtgtgtgttgcttaatgcgcacgaggaagggaaacatacgggtgtgttaaacaaaagcaaacggaacaattccgccatacgggtgtgtgtgcctcttgtgcgcgtgtgcgttctgccgtgtgcatacgcgtgttccttacctaatcttttcgccgcacgctccgcgcgcccgcacctgcaggatgtggatgtcaaggaggccattgcgggccggctggcgtctgccgccaagcaactcgagggcacacactgggggccgcagctgatgagcaaggtgaggaggcggaggggggtcaaggcatcggggtcgacgtgtgtgacgtacggcggggtgcctcgtgtgtttgggggctaggggctcgcattaggtctctcagggttcctctcctcagggctccagtggcatgcggaacagcgtgttgggtagcggtacttggattctggtgctcagcaccgcaggcaggctggtgtgcgtcttcccactcggttgctctttgccgtgcgcctttgtgggcctttttgcacacaacaacgaaatggctcggtatcgtactcccttgtcccatacagtggtcaagggagttggttaaccgcgcaatatagtctcctttccataccacattgccgcttctccgggacagcataaggcattatgattgcatctttccatgctgcatttccatgctgcatttccacgatttggtgaactaggggctggccagacgcttactgacatgacgcgatcctttcgcccctgccgtggctccgcaggtgggcgcgagtgcttacgcacgcgaccccgagcagtggcggcggcacgctgcctcggcttccaagaccctggacgcctttgcaaagatgttcggtgacgggcctgcgggtggcgccggcaagggcgcgaagggcaaggccgagcagcaccaacacaagggcagctcgcaaaagggcgaggaggaggcagaggaggcggctgcggcgggcccgtcagggagagacgccgagcttgaagcggggcttgggaagaagaagaaggacaagaaggataaaaagaagcggaaaggggaggagggggacgggcctgacgggcaagccggccgaagcgggcaaggggatgccggcgccgaggaggagacggcggaggtggaggagcaggatgcgacggccaatcaagggaagaagaaaaagcggaaggcaagggaggtggaggctgccgaagaggcgggcggtgcggcggatggcgggacacaagctgcggcctcagaggtcaagagggcaaaaaagcaaaagaagaaggacaagcagtag

SEQ ID NO: 40 - DNA, 402 bp, Chlamydomonas reinhardtii
atgcccgcgagctccgagggcagcagcaccagccggagcaggacagggagcaggagcaggagcagaagccaccgaaactccaggaagcagcgccctcctagcgctgttgcggacgggcgctggctcgccctggggctcagcgtggggctgggctgcatcggcgtggggctgggctgcatcggcgtggggctgggctgcggcctcaagagtggcctgcgcagcatcggcggtgggctgcgtagcatcggcggtgggctgcgtgggctgggcagggaatccttcgccaaggaaggcagcacccttaaggatgcgtccgcgagttttgggtccaacttcgggtccaactttggagttaactttggggccaacttcggcaccaaaatgcgagaagacgagaactga

SEQ ID NO: 41 - DNA, 1899 bp, Chlamydomonas reinhardtii
atgcagtgtgcaaggaagtcgatctcgacgagcactactcgcaaggtgtgcaagcggatgttgccttgctggtcatcgctgggttcgctgccacaaaatttgcgcttcagcgcttgttcagtcacacctgtggtatgctcttcgcaggctttcggcgccagccgtggctcggccgtcgtagtaaaggcggtccacaggtgtgccatggcggggggcgctggggtgggggttggctgtctccagacagctcacgatcacagctcggtattctgtcgccgctcgggagggtgagccacagtgaggggcagcgggttgcccgggctggcgctgtgagctggccttggaaaagccaggggaaaagccgctcccgtcgttggcgtcgaaggcgtcggacacagctagatggctcagggatacgaaatcagcgggtgaggctcgccacgactgcttgtgaagatacaaatctcacatcacggcctcacacatgtcacccaccctcatctcgccacgccacgtggtgtcacgcgccacctcttccagcagggaggcccccgcggccgccgacgtgccccgccgctcgctgctgctctcctcgctggcggccgcgggcgccgccgccgccacctcgctgctggctgcgccgctgcccgccgccgccgccgacccggtcacggacttcctccgcggctacacgcggccggaggtggggctgcaggaggcggtggtgatcctgatggacgcgcgcagcacactcaaggagatcgaggtgggcagtccgggacacgcggcattggccgcgcctgcgttggtggggtcgttcatggacacatgtatgttggccctacagctgtccgcctcaggaatactggtacttgtcatttgttgtgggcgcatcggaaggcggacaaccgggagccgtgcacctcacgcagtatatggtaccggacacaaaccccggacccattccccggacccattcccacaggccctggctgccactcccgaggacagcgaggagcgcttccgcgcgcgcgccctgtggccgtccttcgccaagcgcctgcgcgccgtggcggaggcggcgccggtggcggtggcggcggtcacgggcgcggcggacaaggaggagacgctgggggagatgtacggcggcaaggcgggcggcgcgggggtgagtgcgacactccaatgagggacgggcgcgaggagaaggagtggcgcaaggagtgaggggagtgcgccgggccagacgacgcgtgagatagtcacatagagggcggagctcgtcggtggagctgcagtgcacatgatgtacaccctccccttgtttgccaaaattgtttgccatctactggggtttggggatcagctgcacctcacgggacttcaccaacctgccttaacactgtcccatcgcacacccatgcctccttccctccctgcccttgcctccctcctaggccgctgacgccgtgtacgcggctctgggccgggtgctcaccatcagcggccgcaccatccggcccgaggcgcaggccggacccgaggcggcggcggacgcggaggcagccatcagcggcttcctgggcaaggtgtggccgtgcgtgtgcgtgtgcatgtatttgtgtgtgtgtgtgtgtgtgtgtgtgtgtgtgtgttaagaacgaaacgagtgtggccctgctgtgtgcggtgtgtcaacacgtgcgagtggtgtgcatgctgtgtggcttctgctgcggcactggcctactcctcactgtccctacgccctcctgcctcccctttcccctttccctgtcccctgtcccctttccctgcctgctgcagctgccggcaccgctgctggacgaggcgcaggccttccgcgtggagcgggccaaggcggcggctgcgtga

SEQ ID NO: 42 - DNA, 1120 bp, Chlamydomonas reinhardtii
atggccccctcagggaaaacatacggtgtcgctgacctgaagcagcacacgacagaaaagtcgtgctggctagttgtacacgggaaggtttacgatgtgaccgagttcctggaggagcacccaggtgcggagctgcgcgcatcggcgtaaaggactgggtcacctggagctggagacttatttacgtggcgctatgctaggttggactgaccaggtactgttgtcgactgctctctggctcgcgctgcaggcgggtatgacatcatcctcacctcgacgggtgagcctttgatgacggctgcagattcagctttgtatgctatagctgtaaactagggattgccggccttagcgatcaagccgcggggtgcgcttggcgccatcggctcgcctttcaacccgcaagcgttgcgggttggatgcttgcaaggggatgtggtctcgatggtgatgctcgcaaaggggatgcctcggaagagtttctgtgcaccgttctgaaagtggtccttgggtcgcaggcaaggatgccacccaagattttgaggagattgggcacagcaactctgcaaagaagcttctggagaagtacgtgatcggagagtttgaggtgcgttctccatcatggacagcagcacaacagcggccgagttggtaggggtgaacctggggtggtagcgtgcgttggagcggaggcgcgattggctactaggtaaggggatggagcagcgcttgggctgactgtggttggccagtctgcttaagcttgaggaacttagcaacggcaggtcctgggaatgcggatgtccaacaggccgcgcccaagggacgagaggtagaggcggtgtatgtgtttttccacggcgcagctgttgcaaacaggtgcattcgcttggacaacgcactgccttgacacccaccatgtcctacacatccccgcacacagggtggcgacagcgctcccgccgtggccaaggtgcctccgcagagcgccaacgcggcgaagcagcagcccgctaagagtgcggcgacgcgaacattccacgtcatcctcccactgctcatactggcgctggcgctggcgctcaacttctacatgatgagccagaagaagtctgcatga

SEQ ID NO: 43 - DNA, 3047 bp, Chlamydomonas reinhardtii
atgaaggtcatcagctataacatattagctccgaagtatgcagggtaagaggaggggatggctcgtgcgctggcggggcgcaataccctttgcaacacccgtcatgacgaggcaggggcacgggccgcgaaaccggggagtaatgcagccgtcatctgttagggggccacgcgtgggcagcgagctcgcacgggtgtggagctgctgcacccaaaccgcagcccttgcgcttctccatcccccaccctgctcccccaggtacaacaactactgcccgccgcagctgctggcgtgggcataccggcgggagctggtgctgcaggagctgagccactacggggcggacttggtggcgctgcaggtcagagcgcttgtgttgaggggcggtggcatgttctgctgctgtatgtgggatgggcagcctgtgtacggcagtacggcgtgcagcccagcatcatgctggcggggaagcgcattccaatgctggcacctgacaccagacagcgggctgaatgacaccaacccgccccctggcgccccaccatgccccgcaccccaggagtgtgacgaggccttctacggcgcagagctgggcggctggatggcggcggcgggcatgcagggcagcttcctgccgcggccggtgcggcggagggcaggaggggcggcaggactgcaaggaggggtggtgcggatgcaaaagcatcagggagaggacagcacagctgacggtgtgtgacgtttgttaccggcaccccggataacttgtggggcgcccctgcacctactagtgctgcatccgcggccggtggctgcaggtgggcccggtgccgggtcccacggagggcattgcggtgctgtggcgctccgcggcgctggagctggtggcgccgccgcgcagcctgctgtactcggagctggggccggaggcggcggggctgccggcagaggtggcaggtgcgggcggcggcaacagctggggcgccgcggtggggcgcgagcgcatttgttgagggcagtgcgcgtgtgtgcgcgagctgcgggtgcccccgctgtgggggcgcggcggccgcctgcccgcccgcgcggtgccggcatggctcgacagtgtggaccacggcaataccgggatccaacggctgcaggacacgcggtgtggtgtggtgttgcacggccgcaggcacgcagccgtggctgaagctgcgggagctgggcgagggcgcggtgatggcgctgctgcggcaccggggctcgggccgcctgctgctgttctgctgcacacacctgttctggaaccccgtgttcccagatgtcaaggcactgcaggtgcggctgctgctatggctgctgcatggcgtagtgaattgcaagtagaatgagactcaaaacttgacagggggtcctgatgccacccggtgccggtgtagcggggcctgttgagcacgcactgccggtgccgtgcatgcggcgtcacgcgtccgacatgagttgttgatgtaccacatcgctgcgcccgccgcccccaggccgcgttgctgtgtgccgagctggccgcgtacagccggcaggcggcggcccagcagcagcaggaggaggtggggccggtgccggtggtgctgtgcggcgacttcaacagcctggcagagaagcggctgccggacggcttcgaccctcaggtgcgcggcgtccaccgtggatgtgcatgtggtgaatgtgcgtgtgccggagagcacaaggaaagtaccatgcaggactgtgtatgcaatgcgatgcgacgcttgcggtattacggtatcttccataggattccctgcaccgacctgccgagtcgagttatcatactaaccctgatatcctgttactccaatctacccaacctgaggcgtgtgctcatacgcgcgggaggacttcttggacgttggctgacttgctgagtgcccccgcccctcccgcacatgcacacgtacgcacacatgtacgcctttcgtttcccgtaaggcaccaccgacaccaacagcccaacgcttctggaacggaaacgcgcgtgccgtcaccacgcagcatgcgcgcatcgcccagcgcccccccacatgcatcccggtccactccaggccacttgcgttcaccgccatgagcgtccacccaagccccgctgccatcaccacatcccccgcgcacccacatcatggccttgtcccgatgtccccgtgtcaggtgccggagggcgggcggttggtcagtggcgtgtacgaactcttgtcgggcggcgccctggcccccgagcaccccgaccacccgcacagccgcgtgtggcagccggggacgatggcgcgcaccgtcacgcccgccggcggcgagggagcgccgcgcttcccggcgctgccgctcagctcgtccgggttgcggctaggcagcctgaacgcgctggcattcgggcggtgagcaggctggttgcgtgtgggcacatgtttgtgccaagccggacagctgccagacggctgccagacggaatcagcatgaagtagcactgtttgcgccgcacgccactgtgatcaaggcgatcgagcaaaccgcgtcagttgggacccccgcgctgcatccccgcccgagatgctcaacaccacaaggcctcaacgcccccgtgtgtgccactgccccaactgcaccgcgcacccagggagccgcccgtgaccaaccgcaccgcccacttcgcgggctgtctggactacgtgtggctcagccagccccacctgcaggtggcggcggcgctggccctgccgtacgaggacggcggcagcccgccgctcacggggcccgccgccgccgacgcacctgcgggcgctgctggggcgcaggggcccggggaaaggggggaaactggggttacggggccaggggcgggggcgagggtgggggtgggggtgggcgctgcgcggccgggcacgtggcgggacccgctggctgacgtggccatggtggcggtgccggaccagcaataccccagcgaccacttggcggtgggcggcgaggtggtgctggtggtgtag

SEQ ID NO: 44 - DNA, 5034 bp, Chlamydomonas reinhardtii
atggcggatggcggcgccgccggccccaccagccgccgcccgcgcctggatgttgacacgtggaccgttcagctagaggagctgctggcgctgcaatcggtgtacgaggatgacatcaggtgggggggcgtggggttggttgggaggtgggatggtgggctggatggggaggaggtgggggaagtagggggaggtggggaaggatgcaactaggttggtaccttgccatgcggccgccaagcgctgccctgctcacacaccaccgccggtggcttccaccctgcagcattcttgcggcgccgggggctggcgcggccggcgacggccccagctgcagcgacggcagcggcgcgagcagtgccccggcgggcccgctgagcgccgaggagctgcttgcggcggggccgccacccgagctgctgctgccgccggacgaggcagagggcgctgactctgagggcggcggcagtagcagcagctgtgggtgcttcgtggtggaggcactggtgcacgtggacatgccggagggagggctgcagttgctgattgagatgccacccatgcggctgcagcagctacagccgcagccgccgcagcagttggcgcctgtagcagcgcctgtgacagccacgggcaccgctgccaacgcaggctctagcgctacagtcatcgcggcagccgcaggggcggcagtagccaatggcggcggcatgtctggcgctgggaagggcgccaatggcgcagcaggcggcggcggcggcggtcgcggcaggggccgcggtgacgccagcgcaaacggcacctcgcccgacaagggcgggggccgtggtcaacagggtaggggcagcagccggggcagcggccgcggcagtgggcgcttgcgcagcggtgacgcgcacgccacctcctcccagacaccttcaccgccgtccaagcaccagccggcggtcatgccggcgccggcgacttatgaggagcagccggcagctgtcagcggcgtcaaggcggccgtgcaggccgcggcgccggtgctggtggtggcggagagcagcccgccagtagctgccccagcagtggcagtgccagcggctgtgccggcacacccggcggctgaggcggagggcgagggcgtagttgaggcggtcgtgactgggcagcaggcggcggggcaggagcggcatgaggcgccactgctgatgccgttcggcggcacgctgcacttccttagccccatccgcctgacgctcacgctgccgcccacctaccccgccgtccacccacccgagctggacgtgcaggtgtgtgtgtgtgtgtgtgtgtgtgtgtgtgtgtgtgtgtgtgtgtgtgtgtttgtgtgtttgtgttgcgtgtgtgtatgtgtgtgtgtgtgtgtgtgtgtgtgtttaaagtacgaacagaacgcgggaaacggtcaacacttgcatgtatgtgtgtgcgcgtgcgtgcgtgtcagcaatcacagggaaagaagaccgtgtgtatgtgcgtgtgtgcagcatagcgtgcggcggacggcaagatgcgtggtccagcattgccttgacacgcgcttccccatgcggcacctgcccgcccgcaggcgctctggctgtcggaggcgcaggccgcgcagctgcgggcggcgctgcgggcgcagtgggcggcggcgggccccggcacgcccatctcctttactctggtggactggctgcgaggcgaggcgctggcggagctgggactcactggcggcagcggtggcggtggcggtggcggtggcagtggagggaagctggtgctgaggcgcgggcagcagcagcagcagcagcagcagccggcggtgactggggcggcgggggcagcagcaggcggtgccaagggtggtggtggcggtggtggtcagagcctggaggcgctggcgatggcgctcgtgcgctactcagcgcggcgggagcagcacgtgttcgacgagtcactggtcaggtgggtgcaggagctgaaggaagtcatggcaccaaacaccaccagtgctgggctactgcgcgtgagtgcggacgccatggtcctcgctgcttcgcccctcccatcgtccctagctcgcaaccaggtgccctctccgctcccgcccctccctcgcctcccgcctccactgacctcccctcccctccccccccccctcgccccccctcgcagctgccccatctgcctggaccagcagctgggctcccgctgcgtgcggctgcccgagtgccgccacgccttctgcgttgcctgcgtggccacacacctgcgcacgcagctgggcgccggcgcggtggacaacatgcgctgccccgaccccgcctgccgccgccagctgccgcacggcgcgctgcagcagctgctgagtgccgccgagtacgaccggtgggaggcgctgacgctgcagcgcaccctggacaagatggaggacctggtgtactgcccgcggtgcaggtgtgagggcgtcgtgtgtaagggcgtgtgtgagggcgtgtgtatgggcgtgtgtgagggcgtgtgtatgggcgtgtgtgaaggcgtgtgtgagggcgtgtgtgagggcgggtggctggtaggacatgagttgcgctgcatgtttgagatgagccacagggtgccgcaggatctggtcgctgggtgccacggagatgtatgtgtgtgtgtgtgtgtgtgtgtgtgtgtgtgtgtgtgtgcgtgtgtttgttgcccctgtcacgctcatctgccgctgccgctccctgcctccccaccgcgccgccccgccccagggagccgtgtcttgaggacagggatcactgcacgctgtgcccctcctgcttctactccttctgctccctgtgtgaggaggcgtggcaccccggcaggtgcgagcgccaacggggtatgcggcatccacatagggggttagccggggagccaagtgtataatttagaatctttgagggggggcggcggtgggagggcgcgtgcgtgattgcgtgatgcggggtacacatgccatacgctaaagccgcaacgcggccgcaccgccacgccgcaccacgcagcagtatcaccttgcgcacgccattatgggtcgatcgggcttgacaggggctggcaggggttgacaggcctgacaggggctgacatcttccccttatcgttgggctcgggcctgtaacaaccctcccctcccccgccccacacttcttaaatagtcatgaatgtaaccccccaccccccacacacagccggtgcctggacgcggatgccaagctggcgctgctggaggcgcggcgggcgggccgcggcgaggcggcggcgcgtgagagcgccacggagcgggctcggcgcgaggtgaacaagatgaacgagctcaagagcctggcgctggtgcaggtgggtggggtgacgaggccgggggggggcgtagccatgcatatgaacggtttgttttggggggtcagcagtagttacgcaccgcctggggcgttcttgcatacctgacaaagggcgtgtacgtgcgtgtgcgcgcttgtgggaaggctggacgcgcggcttgggggcgtggctggctgtagttaccgtacaatgcccctcaccgctgccgtttgctgagctgcctcctcaccgccaacttctccttctgcttcctccccctcctcctgtttcctcccctcccgctgctgccgctgccccccccccccagagctccaccaagcaatgcccctgctgctccatggctgtggagaagaccgagggctgcaacaagatgacgtgcgcctactgcggcgtgtactggtgctggaggtgctgcagggtgagtgcgggggaggtgggcgggaggtgggccggagcggggccgcaacggtgcgcacgctgcacggtaggccgctgccacatgtcttacgactggagtatgtttacgtgtgcgtgtaccggtgacaacgtagcgctgttgccgctgccaacgctcctgctgctgtcgttcccaacgccttgctgctgctacgctgcgcctgccgcagatgatcaagggctatgaccacttcaaggaggtgggtgtggcggcatgtgtgccctactgatgccgggccgtgtggaggggagtggcgtgtagaggcgcaggagccgggcgggggggcggacataggtgcatgtgattgagcaggtcagccatgcacaggccccaggccccagcacatctggatgcgcatgcacaatttcagtggcttgcgggatgtcgcacctcccacaggacggctgcgagctgtttgaccaggtggagatcgaccgctggaacgcgcgctggaacggcggattgtttgagggtgagcaggggtaggggctgcgggcctgagggcctggtgccgccgtggtttgggggttgtttgttttggagcggtcaaatgacctatgtatctgcaattatgcggtcgtgtgcgccccgctcctgcagctccccggcgaaacgaggtggaggataacttggcggcgttgcaggttgcccggcgcgtcggccaggtgcggtcggggggattgtagataccagcccaactaaaccgaacccaatgcctagtcacctcctgtcccgcctgatgtcgtctttatttgttgtgtctgcaatcctgtcacgcatccgtcgcaggggcgctggtgccactgcgttgtgtgcggacagcaggtggggcggcagcgcgggcagtggggttgtggacagttgtgggcgttccttcggactagcagtgcaaatgtgtaccccatcgctgacccattccgcttagggggcaccaacgccagggcttagcgtatgggttgagcgcacctagcatgttaccataccatccgcactctttgtgctgcttgccgccaccccgccccctgcagaaccttaaggagggccgcaacaacaacatccgctgctggtcctgcaacagccacttctgctacctgtgccgcacgtggctgcgcaaccggcccggcgcacacttcggcacgggcgccggccgctgcaagcagcacaccgacgactga

SEQ ID NO: 45 - DNA, 3889 bp, Chlamydomonas reinhardtii
atgcatttggcaggtgattcttgggttgggccctgtggagaagcttttcgcggaaaatgacgcagtgccgatctcaagatacgcaacgcggacagttgttttactttatatgctttgctggccatcgcaggctctcgcagcgtgctcgctgggcagcgcgttggtcgtcgcacctctcattgcccaactgcctccaccagcgctgcagtcgtcgcgcaggcctgccctcacgtaacgaccacagccataacctcgcgcacctctagcgccatctacgctcatcgcgccacaacctcgagttcgctgggcacccgccaccgccatgccgccaccgtgcgacatggcaccggcgtcggcatttcggcagccccccgctccgccgcctcctccgcctccggccgcctgctgctgctgcgcggcgcgggcgcagcttcggcagttgcgcaccgcggccgcggccgcagtggagtggctgtagccgtgtccgccaatctgtttgcccgggttgcgcgcatcgtgaccagcttcttcaacggcctagtcgggagctttgaggatcccgaggtaagcgggggagggcggagggaagaacgaaacagataaaagtatggaaaatgaaatgccagaagaggcggcggtatgaggtatgtggtatggcttagcagaggccaatggtaagctgggttgaggacggcggcgactgcacaggtagctgcagtattgtgtatcgccctgccattcatgtgactcatcaagtatcgcctctcattcttcgcgtcacgtgtacacgctcgaacacaaacggttttgcccccatgcagaagctgctggaccgagtggcggaggagatgcaggaagacatgatgcgaatgcgccaggtgtgtgtgtgtgtgggggggggggggagggggaggttatttggcggcgtagagggaggcgggacgagctgtcacaggccgtgtcgcggttttccccacggtgcccgaatcaccggctcttccgtgtatctcatacttccccacgcacatcctccgtcttccctgtccacctccttcctccccctccgcctccccctccatccgcctccccacaggccacggcccaggtgatggctagccagaagcagctgagcgccaaacagcgcagcatgcaggtgcggaggtggcgttggtggggagagggtgggaaaacggaaaaggagtatgcaggtgccgtggcgtggcgtggtaggagagggggcagcggagcatgcagataccgtgatgtgggatggtggggagctggcggctgcgcgcgactgcacacgcaagcggctgtggtgaacgcacgggtggcgggttgtgctgcggggtctgtgggggattgctctgctttgtgcgttgtgagcaagctccgaaccgccttgctgctggtccaacttgcaccgttgtttccaaccccctccccaaccccctccctccaaatcccctccctccaaaccaccctccacccacccccacctccccgcacagtccagcgccgaccagtggctgcagcgtgcggagctggccgtggctcgcggtcaggacgacctggcgcgggaggcgctgaggcggcgcaaggtgctgcaggaggacgcgggtgagggaggcagcagcggtggggggtggggtggggtggggttagggatggggtggggtggggttgtagataccagcccaaactaaaccagacccaatgcagtagagcgaggaggagagcgtggcctatgcttgacaatggagtggggtggggggcttagggaggtgggggggggattagggaggtggcggggggggggagaagggagggccaatgtagtaggggttggggtgaagggggaaaggccgagagggacaggggaggggaagaggagggaaacggggagggaaaggggaggggacgggggagggaaaggggagaaggggcatggacgggggagggaagggagaggcacgaggaaagaaaatcagtcgcggactcgaatcaaatgagcctcagtctttcggtttcggcccgccttccgtcattcggtgcccattcggcgtgcagaccgcatgagcgagcaggtgaccctgcagacacaagcgctggagcagctgcaggtgagaacgagggtagtgtgtttatgtacgtgtgtgtgcggggggccgggttgagggtggctggaggcccgaggcgaggcggcggctcgtcgggcgggggctggcgtgcgtgcgtgcggtcgggcaccgtgcgtgtgcgtgtgtgtgcgtccctgactcgtcatcctctctgacttgagctcttactttaatctcgctgcgggggccgtcctcacgtcctccgccgacgccccaaagcccgtttccctcccccacgccccactccccacgccccacccccgcgcccccccctaacgccccaccccccacgccccataccacactccccccgcctccccccccacccccaggccaacatccggctgctggagggcaagctgggcgaggcgcgctccaagaaggacacgctcaaggcgcgagccgccagtgccaagacgtcgctggcgctgcaggagatgatcggcgggctgcaggtccggtccggtgagtggattgcgtgtgtgcgtgtgtaagtgtgtatgtgtgcgtgtgtgtgtgtgtgtgtgtgtgtgtgtgtgtgtgtgtgttaaaaagacgaagcccgcccgtgtgagtgtgtgtgtgccctgtgcgtctccattgaccaacgtttgtagctcccgccgtgcgtgccctatgagggtcagcatccaacacagccagttgtgtgacactgactatttccatacccgcacaccggtaacctctttcgcacctgcaacctctctataccttttgcaggcagcagctgggccgcgtttgataagatggaggagaaggtgcgcgcttctataccgtaccactggggcggcctcgcccgtcgtgccttacttcaatctccgtcttgaccctcgtcagttagcacaggatgatgaaatgccgctgacgtgcacgcttgcttgggcgggcttcgttctgttgcgcttctaacatacgcaaacacacacgcacgcacacactgggttctgggaatcagctgcaccctacgggactttaccaacgtgccttaccactgtcccatcgcacacacacgcacacacaggtggctgcgctggaggctcaggcgcagtccgccgccgcgctggccgcgccggactccctggagcggcagtttgcggcgctggagggcgacggcggcgtggacgccgagttggcggcgctcaagcaggtgcgtgggtgcgggtaggcgggtaggcgggtgcagggggttggatggcagggggttggttagatgggtggaatgtgggtcaggtgggtgggatgtgggttagatgggtgggtaagcgggaggagcgggagtagtgcaagtgggttaggcgggcgagagcagtggaaggaagagtagcagtgggagcagtgggaagagaggaagcagtgggaggagaggaagcagtacgtcacgtgcgtggatgggtgcgggggcgaccgccaatggggtggaaagcgaagtttaggtggtagccgactcttgcacggaatgctgtctgctacctccgtctcccccccagtctgcataacaacaaacatttgcaacttcttacttcctttctcctctcatcaactcgtgcggatgcatggacatgcaggcacgccgcagctaccccgcccccgcacttccccgggactccacggccgcgccctccgctgccccctcgtcggccccgcacgtggcgggtcggccactgcgtgacgtgtttgacccgctggagagggagctggaggagctccggcgccgggcgcgggagtga

SEQ ID NO: 46 - DNA, 2341 bp, Chlamydomonas reinhardtii
atgacggattcactcgccgcggacgcagcgaacgttgtgcgccggttcctggagacaggcgcgcccacgtatcccggtcccacgcccagcccatcgccgagcccgagcccgagccccacgccgacgcccagccccagcccatcgccgccgctggtgcaggtcgtggagaccgttctgaacgtgtcgtatgacctcaagtcggtgtcagcggagattgtcctcaacagcacagaggcggttgttggcaccgtagtggacatcgttgccctggtgggtttggctggcaaacgcggtcgggcacacacgtaggcattggcgtgcgtgtcgttgggtgggcagggtttgtgttttccgtctgcggcacgctcgaacatatgagttaaaaggacttcaacatatgcatgtggattttgggcactcgtgtgggcgtcggttacaagcttctcagtcgcgaacgtcgacatgtatccaaccaactttcgttcctgccttccacttcgcaggtgcgcgaaagcattgcgaagactctcggcattaacttcacgcaagtcgtcattaaatcaggcaagttctgcgctacattcgctggcctcgtcggctcctcgcgcgcgccttccttgcggcctttgggcacccgacctttgggcacccgacctgccccgacctttcggagccactcacttgaacgggtccaacaatcagtccaagtgcacttgcccctgcagcacacagtctgacaagtcttcagtcccacacgactaaaccccttacgtgctgcccttgcctccccgcacccccaacaacagtgtccgcgcgcattaacggcgtggaccaagtcatcgcgggggactggaacactctgcggcggcacctactccgccgcatggccctggaagagctccccgcccccgcccgcagcctggcagactccctgcccgccctgcacggcgcgcccggcgaggtctcacactgcggcaagccccgccccatcagccttgccgaggccgagcgaatgctggcgcagggctcggccctgacgtactcgtacgacgcgcgccgcatgcttcaaggatccggatctggaaactccttctctctagacgccatcaacattgacctgagcgtcgtgcagtacgtggaggtgccggtcgagccgtccatcccgccgcccaccaccaacggcaccaccaacggcaccaccaacggcacctcgccctcgccgctgccgcgtccctcgctcatccccatcaacaccacggcgctcacgcagattctcaacgccaccaccatcaatgccaccgttatccaagcgccctcgcccacacccacacccacacccacgccgccgccgcgcgtgcttttcgctcgcttcaagggtgccatggccgacggagtctacaccaagggcctggaggtaagcggcttgcttttgtctgccttttagtgctaatgcttggcgtgtgcctaggcattcaacgttggacccgcaactactgagtcttaccttgccttccgcccctgctgcccatcacagcccgccaacgcctcgggcgtggcccccttcgtcatctggcgcgaggacgcggactttgacaactggcgccgccctcgcaaccgagccaacctggtccacgataagcacctgagctgcggcgccaacaccgtgggcacctgcaccacctgccctcgcgcctggcaggtcggcgccgacagcaccaacgccaccatcctcttccgcgagccgatgcaggtgagagcaggtgcccgtgggcttttgtgtgtcgcgcttccttgcgcccatatgctgctgccattaccatgctgccaacatccggctggccttcctcctccgaccaagcccctcgtttccacctcttgcaccgccctgctaagctgcaacctcccgccggccccctgcttcgccccgcccacacagcttgaccgcattatcatcaagcagctccagaatcctggcgtgctgaccgtccagctgctgccctggcccgcggtgcgcatccccggcctcaacgccaccgcgcgcaccggcaccctcggccggcccatctggtccgtgacctccgacagcaccccgtgcggcggcagcctcaccatcccgctcggctcgcgcgccggcaccggcctggccgtgcccaagcgcggcagccagtcgcttatcccccgcaagctgcgcagcaccaccgtgggcggcatcagcatcattgtcaaggcccagcccaaggactgctccaaggcccccggctgtaccttcattgagtcggtgctgtttgacgggcgcgtgctgtacccggccgaccccgccgccgaccccagcactgtgtaa

SEQ ID NO: 47 - DNA, 3498 bp, Chlamydomonas reinhardtii
atgcttgcccacacgaaccttaccagctcgggcgcgagcacggtgcgcccagctcataagcgcttccatggtcgcgtctccgtcgttccacgcgctgctgcgggtgcccccgcgggtaagtggcatacccctattataaccagtgccagtaagcggccaaggggcaggcgtgaccccaggccggccgtgcccgagcgggtaccgtgtggcacacggcgtttgaggccccctgaccactgacacgcatcgttgtttacaccctattcctgcagccatctcggcggccacggatgcgctagcgaccctccggagcgcggcagccaagcccggctctgttaagccctcggacgtgctggcagcaatggtaacggtggagaaggcgaagctcaaggtaaggtgccatacgagtggtggtgcagtgccgggggcccgtggcgcagtacgcagtagcacattcaacgcgccttgcctgatcccttccggtgccggcactgagtcccttcaagtgccccgctttcgatgtcgcctgccattgacccatgcacccaatcaacctccgctgctcccccgccgctggcccacacacggccatacagccggagaactgggaggccaacctcacggcgccaggcacccgctggcggctcgtctacactgtgtgtgagtgtacggtggcccgcgcggcagcgcttatgggtgtgcgtgtgcgggcgcggtcatgtgtgtttgtgcgtgtgcgcgtgcgggcgagtgtccgttgcggaacggtgacgaaccgaaagtgggctgccaaagcatctagctggccacctagctcgctagctagttagctatttatcatggtggcgctcaaggtatggccatcacatgttatctcgacgcctgcacatgagctgactgacgtgcgtggaagccccaacgctgtcgccgtccctcctctgcacgcagccggtaaggacctgaccgctgcagccaagaagcagaaggccgggtcgggagcctacttccccatctccgcatgccaggtgcgcgggcggcagacgccaggcctgcggcaattgcacacgtgacgggcatgcatggttcgacagcatccgtagttctgttcgggtcccgcggctgctacgctagacagcgccgcgattcgccacgagtcgctgcgattcaggttattctgaatgtacggtgcatacgtatgtgtatcctgacttggatgtgtgtggattaatgctgtccctcgtgcagaaattcgacgacacgggttttgagaacggcgtgttcttcgggccggtggccaacctcaccttcaaggggccctggcagctggacgcggtgagcggggttggggtgggaagggggggttgtagtttccagcccaacctaattcaaaccaagctaaaacggggagggggtatccgtttatgtggaggagaacggagtgttttatgcacaagtaggggggccgcggggggctacatgcccgagcccaacgagcaagtcccaggggcaagaggggcagaggggcttgcgcatgaagctcgcacacacagtgtcgcctgcgcgacgcgcctacccacttgcttggagcagcatgtgaagaacaccggaatattgcctgttccggtgacaatatcagggagcccgaccagtctccggtcggtgatgttgcaggctgggcatgtggtcatgagcatcgccagcctgtgcaggcctgctcgcccgcgctgccgccccatggacaccgcgatggacttggacagcttctccaccttgtccttgctggcctgctggcccagcaccgcactcgcaaggggtatgtacttggccgatggcgccgagcgcagcgccgacaggtgcagctcccgggacttggcctccacctcctgagtgctggcgtccggccccagcaactcacgcgcctcggccatgtaggccggcactgcgcaggatcccgccgccgacaggtgcagctcccgggacttcgcctccacctcctgagtgctggcgtccggccccagcaagtcacacgccttggccatgtaggccggcactgcgctggatcccgccttctggccccgccgccgtgctgttggacctggacctggacgtgagctgcctccgtggcagtggctgcgagaaacagcatcagcactgccggccgctgctgtacaaggaggcagtccgggccttcacagcgtgcatgtcgtctatacgagaagacctggaccttgacctggaggctgcactgaagctaatggacaaggtaacagcacggcggcggggccagaaggcgggatccagcgcagtgccggcctacatggccgaggcgcgtgagttgctggggccggacgccagcactcaggaggtggaggccaagtcccgggagctgcacctgtcggcgctgcgctcggcgccatcggccaagtacataccccttgcgagtgcggtgctgggccagcaggccagcaaggacaaggtggagaagctgtccaagtccatcgcggtgtccatggggcggcagcgcgggcgagcaggcctgcacaggctggcgatgctcatgaccacatgcccagcctgcaacatcaccgaccggagactggtcgggctccctgatattgtcaccggaacaggcaatattccggtgttcttcacatgctgctccaagcaagtgggtaggcgcgtcgcgcaggcgacactggagaagttgtcggatgtgcaggtggagtagtaggtgacatttatcaatgggtgatgctgctggaggatggcgccggcacctgcaactatcagaacaggcagtatgatgcgtgctgggtgatgcatgctgggtgatgcgtgctgggtgatgctactggaggatggcgccggcacctgcaactatcataacagtctcccctgcgcacacacattcccgcgcgtatcccatttccccgcccccacgcccatcactctgtgcaacgccgtgcctgcgcttccacgtcactttcttctaattcgtcgtgcgtggaaacccgacccacccccatcccgcccgcagaaagtgtgtcacttcgacgtcaacaccatgtacctgggcctgggcccctggcgcctgcccatcaagctcaaagatcagacgccgctcaagcagatggccaccaagtgagcccacagccgcacacaggacctgagaacctaccaccacaccaccgtcaccaccacgccaccatcacgccgcgccgcaccaacctaccaacacactcacggcatcatgctgtcgcctaaccagacctttaactacaccttgccacatccaaccacaccctgtaaacacgccttttaccacatgcacgcctttcctcctgcctcagggagtttaaggcgctgccgttcttcgtgtacgcctacgtgggggaggacattgtggtagcgaggggtcgcagcggcggcgtggcgctgtggggccgagccgacgccgcctggctggccacctcgggagccatgcaggtgtacaagtag

SEQ ID NO: 48 - DNA, 28072 bp, Chlamydomonas reinhardtii
atgtttgagtcccaggttgcgtactacctggatcgataccttggccagtacctgaatggtctggatgcagcggcactccgaatttcggtctggcgtggcgatgtcgagctcagcaacctttcgctgaagccggaagcgctcgcggaccttgacttgccagtgacagtcaaggcgggcttactcggaaagctcacgctcaaggtaacgcgtcggagctgttcgagttggagctgttccgagttgggtggcggggctgggtcagcaggcggtgcccttcttgaccaagctgtcagaccggggttcggcccggcaaggatggagattacgagggacaaacagctgttggcgtgctgttgcagttaaaatgataccgaccagcccgcaggcgggggaggagtcggagctagccagagccgaccaaggcagcaaaaccctaggcagcaaacgggcagacccgcttcacctcgcgagtacctgtaccggtggccccgacgcggactccgcaatcactgtagcgtataactgctacctgggtgcatgaagtaactgggtgcatgaagtaactggtacctgggtgcatgaagtaactgggtctcgcgtgtgtcacaggtgccatggaaggcgttgggtcgggagccggtcgtcgtggagtttgaccgcctctacatcctagccggacccaaggagcagcagagcgcgcagccatgcaaggtgggttgaggatagacatgttacaaatgatgcttatgtgctgccatgagggctgacggagtcgcgcatgagtaaggctttcatgccgcgaagcctcttgcatgtagctcagccggcccgggcccagtggaatggctgggagtcagtaagacggcgacaaacacatgtggggtgagaggcatgctcgcaaaatgcatttgcatcccgcaaacagatgtccgtgtcagagtacgaggcggagactgtggctgcggagttggaggccaaacggcgccgcgtgctggcggcggagacggcatggctgcaggtactgcgtgtgtttgggtcgaccgcgcgtgcgtagatgtggagtttggcaacagaatggctcgtgactgggcgccagctgggtggcaggggcacatgcatactgggaacgggagcgatgccggcccgccccgcgtgggctctgtggactgtccctacccaggagctgcaggccaagctggcgctcaaggcggcgcagctcaagggccagctgcagaagcaggcggcggcggccaagtccgagggcggcggggggctgttcaacctgcaggcgctgatgcacacggtgctgggcaacctgcagctgcgcctcaccaatgtgcatatccggtgcgtggcagcccacgggttacagacagaggcatttcagggtcatgtgtcaatgggcggcgatagtgtggatgcgcatacgcatggtcttgtgctgtgttatctttccatccacgtgtccgcatcagaactgagcctctgcattggagccacgaaagttggatatgcttgctgcgtgcccacatcacacgaacccacgcccttttcgcgcacagttacgaggacgggctgtcgctgccgggccagctgctggcggcgggcgtcaccctggagcgtgtgtcggcacacacggtagacgaggccggccgggagaccttcgtcacgtcgggggtgcttcagctgctgcgcaaggtgggcgtgttacgtgcgtgatggggcacggagttctccggggtttgggactttagatcactctcctcatgaccccagaattctttcccttgacacagacatgccggtatcaatgtttttcgccccctacgcttgttctccctcccgcctaccctccctccctgcctgcctcctaaccctcaggcggtggtgcttcaggagctgggggtgtacttcgacgtgggccgccccttcttggtggcgccccgcgccgactggtcctcactggtcatctacgagtgggacgcgctgttcctgcccgcacgccacgcccccggcagctctgtgcacccgcaccacttcctggtgatgcccatcacgggactcatgaactacgtgcgcaggagcagcaagacgctggcggcctccgccagtgccgcgggcgccaccagtgccgcggggccactgcccaagcaggagggccgcattgcgctgcgctccgtgagcctggcgctcagccggcagcagtacgtgggtagccgggcgctgctggagacactggaccgctacacggccaacagcccatacagggccatcaggccaaagggccggccggcggagggtgagcgggggcgatgtggcgctttgtgggggcttctggtgttccaggtgtgcgtgtgtgtatgcgtgccgttgtgtttggggccaggtccagccccaagcatccagccaacgctgttcctccgggggcaatgctgcccgctggtgccgtgcccacatatgttcccgcgtcaacaccacacacggacctcgcaggcgaggctgcacgtgtgtggtggcgctacgccttcttgggggtgcgcacgcagctgcggggcagccgggtggcctggacgcagctgcgcaccgcctgcctgctgcgcaaggcctacgtgcccgcatacgtgcgctgcctcgaggcggcgtcagcggcggcggccaagggcagtggtggcaagggccagggcgccgggcagccgggtgcgcccactgcgggtctgggcggtgacgcggccattgcggctatggacgcgcagctgccggagagcaccatcctgctgttcaggtaggcaggtgcatgcggacctacggtagggaggcgaagcgtgtgtaaattgcaacctcatttgcaacggcgcgtgcaggcgtatggcccacgctcagctgcagctgaagcaggagaggggcggcaccggactgccctctcgcggcgccagcaccacctcgtcgtccgcctcactgctgcagcagcagccggggcagcaggccgctgcagcgccagctggcgcacctgccgcagcgcccgcacaggatcgcacctggatcggctggtggcgcggcaccaacaaggctgccgcagcggcggcagcagcacctgcctcgcccggcggtgcgcccgcttcgggctcggtgtcgggcgggtcggaggtggtgatgggccccagcaccgcgaccctcagcccggaggagtggggccgcctgcaggagctgctgcagcagcaggtaggcgcgctgggagagtagggctggagtgaagacgttacatgtatacgttgtgagttatggaatcgagattcttgcttggacgctgtgaggatgtgcagcaatgcacttagaaataggtggaagggaagggttggacaccgtgcatgctagagatgccatgtgtgtgcctgggtactgacatttgcctgcgcacttcctccaccggtttgcgcctgggcaggagtttgcagacgacgacgacgacgacgcgggcggtggtcgcgacgggccctacaccctgcgcacactgctggaggtggctgtggagcgggcctccttggagctgaggggcgaggtggggcaggtgggcgcagtgcccggcaccgaccggccgcggcccatcctgctggcctccatgcggggcctgggtgtgcgggtgctcaactaccccaccgccctggcgctcaacgtgcggctgggctgggcgggcgtggaggcgccgcagggcatgctgctgtgcactggccagctgggcgcggcggaggggctgggcatggggctaggcggaagggtggcggctggaggcggcggcgagggaggcgctgtgttcggcggtgtgggcggcgggctaggtcggtccgggccgcccacccgcaccgccacacccgctctgcgatccagcactccgggtgggtcgttgaagccagtggcctccagcgccgcactgcccgccacagcaccagccgaggcggacgggcgggctgcagcccagccgtctgagccgctgccgtgtgccttcatgctggacttcatgaggcggccgcaggtgggcgcgggaggatgggcagattgggaggcggggccggcgatgttggattggaggctaatggctgcacactcgtgttgttcaccggcacaacttgcttcatcgtgtgctgaatgtaattgtattttaccccggtgatgtgacacggcccccgccctcgcccgcctgccaggacggctctgctgacgcggtggtgagtgtgcggctggcgcccagctacgtcacctacaacggcgcggcgctgcgggcggtgggcgccttcttcagcagcagccagcaactgggcatcggcacgctgcaggtggggcacacgcggtggtgcgccggatgcgtgcaaacgcttaccgcttcaacagccgtgtcggctcgcccgcattgctactgtgctgtgtggtgcgccgcctttggagcgcatctgcacgctgtgcgctgaacccgtgaatgaatgaggcttttatggtgaggctgcgttcggtctccccccttttattggggggagaccgaacgcagcctaaaggggggagaccgaacgcagcctcaccatccgtccgagcccgtgtcgtcctcgtgctttgctcgctcagattcaatcactcctctttttaggttttccatttgactttgacgttgacttgtccagcgtgtgaccaaggcctcgcgtccacccatccccactacaggcccaggccgccgcccgcgccgcccagctgcagcggctggcggccctgcggcttaaggcgctgtcggccgagcggccgcggctggcggtggcggtggtgatgcacgcgcccaaggtggcgctgccggacagcaaggtgcggcggctgggcggcggctggagtcacggacccgggtttgcagtctgagtccgggagcctgcaataggtttacggggactgcaggcagggcggcgggttgtgtgtccaggttgtcttgtacctatgcattgcctctgctgcatcgctggccgtccagggtcgcgccacgctgctgctggacctgggctgcttcagcctcagctccgccacacccgacagccagggcctagctgcggacggcgaggaggcgggtctgtacgagtgcttcacgctagggcttgagcggctggaggcgggcctggtggggggagcctttgcatggccctccacacagccgccgcaggatgaagacggagacgatggcgccagtggcgacggcggtttggctagtggtatgacggctgcggccatgacacggtggggccccgccgctcgggcggtgcagacgggcggggctgcctcggacgcgctgttcggacccataccgcagaagccttcggcggcagcggcggcggcggcagcagcagcacagactgcaagccgcgagcagccgcagggtctggctatggttgcgggcatgactgccaatgaggaacaagaggcagcggcagacgattcagcggccggggccggccgcacggagtccccacagccccgcaaaacggccagtcgggcgagcagtgcgtgtggcagtagccatggaggagggacggaggaggagggcgaggagggcggtgctgcggtgcccggtgtagccgacatgggccatcacggtggtctggcggacctgttgcgtcagctggcgctgcaccgggcggcggcggcggcactgcagggcaagggttccgccgccgccggcgcctctgacgagcctccacctgagctggtgccgctgctgtcccgcttcggcgtgattgcggcgctgcaggtggccactgcgccgcacccccggctgccggctgtccgcacccggctggaggcctcgccgctggtgttccgcttcagcccctggcgcttccaccgcctcatggccgtcatcaacagcctggtggcctcactcagtagcggcagcagtggcggggggacaggcggaggcgcagccgacggagcggccggctgcaaagaggcccttcaggtgcggctgccgctgtgggtgacggacgccgagtacaccgcccccgtacagctgctggtgtgggagggggtgggcggtcgggtggccaagtggcagccccggcagctggtggtgtggcgcggccgcgtgtacctcagccgcagccccggcagcggcgtggtgtctgagagccgcagctactggcgcggctggcggctggtggagctgccgcccgaggaggtgggcggggccgagtgtgcggtggcgatggtgccggagggcgtgcggcgcgaggcggcggcggaggcgcctgagggcctggtgctgcggctgtctgaggcgcggcaagtggctgagctgcgccgcaatatgatgcggtcggcggccctggtggaggcggtggcgggtgagtgggcgggagcagagacggcgggtgggtgcaaggcagcgagttgcgcgggtcacaatccgggcctgagaggcgcatgcaccccagcgtgcacagcggcatgtcttcattggtttgcccgctgtcgtcttcaattctgaactgggctttcacgccactgacaattgacaggatacatggccacggacgcgcacattgagtcgcctgactcacccaacgccacgaccggcacagcagcaggcagtggtgtgggcggcagcggctccgtgggcgtgactcgcgacctgctggatgagctgctggcgcacagggacgtgttccagctgtccggacgactgcccgcactcacactcaaggtgtcaggcaggccgcccagggcatggagggctgttcggcggctggcggctgcggagccgctgtcagcgggtggcacggcagcggctgctggcggcacgtacggcgatggcccggggccagctgcggaggtgctgggaaacatgtatgcacagcagcagggtcccgagtcacacgctggcacggacgtggagggcagcgtcgccggggcccgcggcccggtcggcaccaccaccggcactggcggcggctccacctcatcgctcagtgaggcgggggtgccctccgcgcctgcgtctgtgctgtcagcctcggccaggaccacccgatccagtcgcctggcgggtgggggccagctgccgccgcgtccgccgccgtcagtggcctgggggccggagggacctggcgactcggcggctggggggctggcggagccggacgcggacccgggggagggcggcggcgaggagggcgatgatgctttcgaggacgcggatgactacatggatgaggaggacagctcggaggcagatgaggatgaggaggacgaacgattcagcagcgacgccgccagcggacagcggagcccgggccggcggggccacagcactgccgtcgccgctctggaggccctgcggcacctgtctctggaccaggagacgccgctgctgagtgtggctctgactgaggctgacgtggcgctgcagtacagcgccgaccgactggcggtggggctcaccatgcaggtcaggcagctggaacgtgcgggtggaggggggtttggcggtggggctacacagcgggagaggaggggtggatggggttggcagcagcagcacacatgagcgtggagaactggcatgatagtgcagctcaccagtacaagcttaagcctgacgaggaaggcgcgcatgtctgtttctgccctgcatgtccccgcccccaggcactgcgcatggaggatgagctcatgggcgccgcactgggccgccagttcgcagtcatggcgctgtcctcctcaggcccgaccgcgccgccagcatcagctggggccaccgcccctggcgctgaccccgccggtgctgacatccccagtgagtcagcgcacccatccgccattaactggcagccggtgcccatcaccaccgcgggccaggatgccagtgccggtgccgccagtggcagcgctgggcctgccgctgtggcgccgctggcgcagttcagcttcatcagcaactcctccagctccgaccgctacaaggtgcggcgcatcgctgagtttgcgccagggtatgactgcgggcgatacgggacctgcctggaacagccactcgcattgccctctcgcattgttcccacgacccgcgcccaccccacagggtctggactcggagctgggtctgcagctggcgggtctgacgctcatgtgccaccgccccaccatcgccgctctcatggggctgggctcggacatggggtacgccaccgcgctgctgtccgccgagagcggcacgcagcagcaggccggtgccgcgcagcttgccacatctcctgcccctcctgctacggctgctggtgctgctgctggcatcaccgccccggcacagggcgcaggtgcaggtgcaggtgcaggcaacgacggccctgttcgtgcgggcggcgatgggcgcacgctgctgcggctgcacatcagcatgtcccgcctgcagctggtgatgccgtacgaggtgctcagcgcccaccagcgggtggagccggggctgacgcaccagcaggtggtgctgacgccgcggcagttcgcacaggcggccatggacaattttaggtgggcccggaatgagttgttacaaaagcacttacaagcatgacggcttgctcctgttgtgaaatcggtttaccgtagtgcggatccgcgcacaccacacgaacggctccaacctgtccgttgagcgaaaccctttccactttcccacacccgccccatccaccccgcacctgtctccagcttgcgactggacgtgcggccgacctcgctggagctgtccaccagcctgggcaacttcacagcgcagtacggcgcactggcggaggagtcaccgtacaggaccatatgcagcctgcggccgggcagcagcgcgggctcgctgattgaggtggtgttcaggtgcggggcaggcgcgacacagctgggataaacatgtggcacaacttgcagatttggaattgcttgatgtcgcttctcagctggcatccactctgactcaccggtgccatgtgggccctcacaggatgcactctgccgcggaggccgccgctgagccgcgtgtgccggccggcgccgcctactcgtccctggtggcccggctgagtgcggtgcaggtggtgtacatggggcgcttcctgaccgagctgctggcttacataaatggtaaggggggccagacggcggtcgactgcagtcggcatgccgcagacattgcgtcaggaaagcatggctcgtctcgctttgcaagttgcctcaacactgcttctggctgtttcctcctgcaggtctgctgtccatgcagccgcgggcaaggccgcccctcagccccgccacaccaccggccccagccgccactccggccacacctgcccccgcggcgccggcgcctgcacctggcgcccctgcccctgccgccagccccttcgtgctgctgatggacgtgcaggcggcggcgcccgtcatcaccctgccccagagcagctccgcggcgcaatacctcaccgcggacctggggcacctggtcctgcgcaacacagtgggctggaggcactgcggcggcgcggtggcgatggcgggagctggcgccgcgccaggcgtctccgtgcccgctgtgtcggatgccactggcgccggtgtgcggccgctacccatggtgtcaggtggcggcgctccaccctccgctggggacgccgtcggcagcagcgacagtggcggcagtggtggcggctggcgtgtgctgatggacgagatggtggtgcggctgcgggacatgagcctggtggtgggggcgggtggtggggtgccgcccggtcagaacatcattcgtgacgtgggtccgtccggccttgggctcactctgtaccggccactggcaatcagtggcggcggcagtgacggtggcagtggggctggcagctcggaccagccagctggcagccgccagccgcccatgccgccactgcatgcggcggtgagcatcccccggctgggcgccgtcatcagcgagctcgagtaccgccggctgctggcggtgctgtcaggcaacttcgctgagccgccagtcaacgacccccgagtgctggagctgcagcagctgctggccaggattgctgcggctgccgccgcggcgccacccagttcactagccccgcccgccagcagcagctcgccggctccccaacccagtggtgcggcacaggcgcagcagcagccgcatccacccaaggcggcggcggtcggcaaggcgggcgctggcggctcaggctcagctgacggcgcctccgccgcggctacccagcactccaacagtctaccccccagccggcggcctgtgttcctggacttcaaccgctccatccgctccgtgctggaggcgctgcaggacacctgcacagtggaggtgagggcggatatgccgggagcctggacaggccggggtgccgtgcctgtggtctagtgcctggtgtggtctggtgcctggtgtggtctggtgcctggtgtctggtgcgttgaccacagtgttgcttggctggtcatcgttacccgtctccctccgggcctgcctgctccgctggtccgtatccagcatttccagtgattcgctccattcttcacatgaacgcctaccccctctctcgccctcttaaccccaggccaccgtgtctctgggcagcgcccgcctgacgctgctggtagaggcgacggacggcagcggccggctgctgcccctggcctccctgggcctggcagacctgtggctgggctactatgctacctcccgcggtgccatgtgcctcagcctggcgctgcccacgctgcaggttgaggacctgcggccctctgtggcgcccgagctgcggctggtgctgtccactcgctccacggcagcggcggcgctggcgtctggcggcgtggtgtcctctgcggccctgactgtgccggccatcagtggcctggacggcgccggctccagctccagccagctgcctcagccgaacccctcccttctgaccctggagtaccgcgccgtgccagccggcgtgatgccgcctctgccgccctccggcagtcagcagggagccaccagcaggggtgccgcgccgctcggcggtcctgctgcctcggcgccatccgctgcctctggcccggtggcccgcagccccgccgccactgcgctgcggttgcggctgcagcggcccaccgtggtggtggacttcaacgggctgctgctgcgcctggtgaacttcgtagcccccaatcccgtgttccagggcccggcgccgcgaccctttgagacccgcgacctgctgctgtcgccctccgccccctacctggcacaaggccgggacctgtggctgtcgcccgaggtgcggctactggcggacgccccgcccgcagccttcacagggccacagggcgcagctgccggcagcgctccggacactggctccggcggcgcccccaccacctacccgggcttcagcagcggcggcagccacatccacgtgtatgatggtggcggcgggcggctggtgctgccgcccgccctgccgccctccgagttcctgccgctcattgtggtgggcgcgggccgggcgctgcagctgcgcaatgtgcgcatcgtcaactgcgcctcgctgccgtcggtgctgcagctgggcgcgggggcgcggctggtggcacgtgaggaggacggcgtgaagatgctgctcgcggcgccggatgcagacaaggagtacgcggcagtgctggcggcggtggcggcggcggccgaagcggcagccgcggcgtccgcagcggcgacagtggcgggtggcacggcagcacaagcatcaggagggaccagcctgacagcgggcgccagtgtgccgtcaccaatcttcgaggtggcagtggaggcgctgggcgcggcaatccacatggtgggcagtgacggcgccgctgacggaggcctcggcggcccgggctcggccgccggtgcatcagcaagccgcggaggttcagctgctggcagctacagcgccaccctgagcgctgctctaggccagactgtgggctccggttcgttggctgcaggctcaggtgcagccggcgcaatggaaggtgcagatggcaccagcgccgtgcccaagacggtgctcaaccgtagcactactgacctcgcagctgccgctggcgataccggtgacggcgctggggtgggcatgggactaggatcagcgtttggaggcgtgggcgctgctgcggccaccgcggccatcctgtcctcccagcggctgcggcggcggctggtgctccagctggatgtgtccgccacctaccgggccgggggcagcgagcaggtggccgcggctcagttgcgcggcctcaccatacgcacactgaccacctttggcgggactgatgtgggcggcgggcttgtgcgtccggcggctggtgtcaccaggccaatgccgcccgcctccgcaccgctgtccaagaccgacagctcggccgcccacctgcccgacacgccgtcaggatgcgcagcaccggggccccagcccagctcgtcgctccgtgcgcccccgctgcagccgctgcaccatctggagcaccaccaccggtccgcctcactgaacaccacatacgccgggccggtgctgcccacccggtccactgccgcctcctactccgccggcgccgtggtggcgtccgtgtcggccatgctgctggagcccacggacgtgtccctgcgcttctccgccaccgccgcctccaccgacctgtccctggactgttccagcctgtctctgcggctgtcgcccgccggcctgcacctgctgctgcagctcaacgccggggccgccacccagctggcggtggcgcggccagaccagccgttggcgcgctgcgaccgcttcgagcgcatgtggggcagccacgacgccggcaccggcaccggctcgggcggcggggccacgccgttgcgtctggagctgggagtgggcggtgtggacgccatggcctcggagcgcggcgtgacggtgtggcggccgcagcccccactgggctatgtagcgctgggcgacgtgctggcggcgggtgggtagcgggggcgggtgatgggccttgcggagcaaatgtacattcatagctttctaacgatccgatcacttccgcgcacttccttcctcggtcgctttcctcccccaggctcgcaccagccgccaaaccaggttgccacagtagccataaacagcggcctcatagccttcccactggggtttacacgggtgtgggcatcagcgcctgggtactcgtctgcagcccctgcagcccctgcagccccctccacggcgctcaccacctcggcctcggcccccatggcctcccacttctccgccgatctggacactcggcttggggcggaaccggacgtgtgcgtgtggcggccggtgccgccgctcggctacgtggccctgggctgtgtggtaggctacggggcctcgccgcctgcactgggcgtggtgggctgtgtggctgctgcggctgtagtggagtcgcggcttggcgagctcctgctgctgggcgagggcggtggcggcaactggtggcgggtgcagaacgcggcttgcacattcgaggtgtcgggggcgcctgagggcattgctggtggcggtggtggtggctacctgccctctgtgccggtctacgacctccgctcgccactgggtgtgcccccggccgccctggtgccactgcctgggctgcttcccttcccctttcccggcctcatcgccaccgaccacctgggccgactggtggggagtggcgctagtgcgggcatccccaccgccctcagcacggtgctgctgccgtcgcaaggcagtatgcaaccagctgcaggcgcatcgggcggtatgccgaggcccggcaccaccgcatctcccccggtggtgcccctgggtctgatgcgtcagggcagtgtgccgctgggtgtggtgaccggcagtgcgccgccgctgtccctgctgtgccagcagcgctacctgaggtccaggaggtgagacctggggcaggcgacacaaagcagcctgtgcgcagcctgcctgtcttgcggccagcatgtgcagccgtgttgaggcgtgagcgcatggctgacgcaatcgcgtacacccacaggtcccagattagccgcgcggtgacccaggcctcccaggtgccgtgtgtggagttcaagaggatttggtgggacaggaacctggcgggggcggggccggccgcgccctcacagccgcacagccacctcagcatatggaggcccaggccgccagcggggtgagtggctgtggacgcaggggcagggtgcaacatgatgcgccaaccccccactgtgccgtgctccacgccctcgacccctcctgcctccccctggagccgatcacccctcctgcttctccctgcctccaccccagctacgtgtacctgggcgacacggcagtcaccggcatctacgcgccgcccacgtcggtggtggtgctgcgggacagcgacccagcggccgcactcacagagggccgcccgccgccactggcccgccccatcaactacgtgcgggtaagcgcgcagcagcaggaatggggctacctcggcaagcgttgtttgtattcacccaagcgtgtgtcgccatgcttgaaagtgtggctcccgccgacgtcacctacacactgcggcacttcccacccaggtgtggcatgacgaacaccgtgagcgcctgggcgaggacacgtatctggtgctgtggcgcccggtgccgccggcagggtatgtgccgctggggctagtggcgcgagtgggaccggcaccgcccgagccaggactgcccatccggtgagcgctctgagcaagcatatggtaacagtgttggttggcctgtgattacctcttgcgccacttgtagagcctctcgaccccctgcacatgcctgtccctccgtgcagctgtgtacgggccgacctggtagctgcggacgagctgcagcgcgcctcccccgactggttcgtgccggcgcacaagcagcgcatgccgctgtgcggctggctcacggaccgccgcaccggcaccttcacggtggtggtgcccacgccaggagccggcggcggcgcgccagctgcagaggggggcggcccccgggcagcggctgcgggcggcgtgggtgccggcggtgtaggcgccatgctgcaggtataccgcatgaagctggatgcggatgacgaggcgccacagccgccgcatagcacaccgtcgggccccggatccggcaaggcccaggcgtcagcttcaagcgcgtcagactcgccgtcattgccgcccgtgtaagtggcaaatgggtatccatgctggcgttcttcgcaattgtatgtatacgtcaactgtgttgcacaatgctcgaccacaagtgcatcccacaacgcggcccgcagttgtttgaccccattcctccacccccctacccgcccatcaccatcagttccaccaacctggagctgcgtctgggccgggccgcagtgacggtacgcacgagcctgggccgccccctgcttgagctggacgtgcgggaggcgcggatggggctgtgcacacagggcccagacgtcagccgcgggttcgccttcctcaccatgtccgcctggacgcactcgcccaccctgggcgtgtgggagccgctgctagagccctggcaggtgggttttgcttggacaggaacggggaacggcggcatgcgctgccctacccagcccctgtacatgatcgttggactgcatggttgtgagcgttgccagcatcgtatccctacttgtaattcccatgctcctgtgcctttcctgtgcagctgttggctcacgtggatgtgaaccgcgcctcccggccccgcggcggtgtgggaccgggcacctgggtgcgcttcacatccacacaggtgggcgggcatgaagctgagcacggccacggcgctactgccaacagagcagctccatgctgcccagctgctcgggcatttctgccggtacccactcccattgacgccgccactttccctcagggctcggtgcacgtgtccctggccgccagcgcattgcgctcactgctggacgcgctgcccgaatggagcagtctgacggggccggagggtgagacaggcgcatgggaggtgctggtgggctcgcttcctctcggcagtggcagtgcgcaaaccagagagcggatcctgatgtactcgcgtttgcatcgtgcaggcgtggccacggtgcggcggcagctggcatttggtgaggcaccagcgaatgcgctgggcggccaggtgggcagcagcggcgcgggcgggcctgccctgcagcaggggctggtgaccaacgcactgggctgcgaggtggcgctgctgacagacctcggcgatagacaggtaaacggatgcgccttttgtggcatctggctgtttaagtgcgtgcatcccaagctttctctatgttgtgatcaggctggccacatctgttgctgcggtgtctgcgtgctgactggtgacatgtgcacgcacattccacccgatgcaccacaggctgtgtcggagctggcgccggatgctgagggagtgccggtgctgctggcgccgccgcccgccgcgtctgctgccgcggctgctgctgcagagagccgcgccaccaacctggcgcctcctccagtgcccgccatccggctgctggctgatgcggtggccgcgaacgggctgtcgcctgagctgatggcggcaggggctctcatggtccgcataaaggtgcgttcctgtgtaccgtatgaggggttcgcagtttgcttgcagagcggaacgcggctttaaagcatttgatcataatcgctgtacccatgcaggtgaacggccccgcggcggagctgatgcccgagaccgcctggggcctgtacacccgggcggtggagacggccccgcctccacccctgcccgccccggcagcggatgaccccgatgatgccacgtgtgacacgcctcgctcctcagccgaaccctcttcggctgcctcgggagtggaggtggtgtggaacgagcgctttatcctcaagctacctgtggagctgagtgagcagctactgtgccccgcgcctggagacaaccagtttgccggtgtcccgctgcaggtgcgttgcaaggttacgctgtgctgtcatggtgccagaagcttttgtgtgtaggccgcagcgatgcccatgcatgcatcaaaactatctgcccttatgccgcgcaccattttgccgtttacggtcctggcagctggacgtgtctctgctggcatgtggctccgcgggcgggccgccccgtgtggtggctgccggcaccctgccgctgcagtccgactggttgaccaacgaggtggacatcctgcgcaacacggcggctgcagcagtggcagccgccacagcggccggcatggcggcccccctgctcaacgagggcggggtcatcaactcggccgctgctaccggcggcgccaccggctccgtgaagccaccccagccctcgtccgtgagcgagacgctggatgtgcccctgtacctggtcactgtgcagtccggcagcagcaggcagccccgcacgcagcagctccagcagcggcaggcgctgggcaaggaccgggggccgcaggagtccatggcgctcaagctgcgtctcagcctggacgtgcagcaggtggacagcagttgggcgcccttcctgtccaagtcaaggcgaggccggccgggtgccgggggaagcgcagcgtcagcagcgctcagcggggcgggtggggcctcgtctgcggttgctgcggccgctgctgcgcgcggtgggcgacgggctatccggctggcgggtagtgatgtgtgggtcccgttcaaccagacaggcggcatcatcacggcgggtccgggtggtgacacgcttcaggcatcaagtaagttcacattacttgggtatgctgccgtatcttgttgtgaacaagcgtctctgacggcctattctgcacatggtggactgcctgaatttgagcgcccaacccacctcacctacgcttcacggtttcctcctctgcagacacggtgcccatccgtgctggccccggcctggtgctagagcgcaccccgggccctggcggccagcccctggagctgcttcgctcgctggctgtcctgcacaactgcaccagtgtgcccctggaggtggcgctgatggcgggagaccccgaggtggccagctggatgctcctggcggacacacccgcgtccacgtcatcagccccaggccgtggagctacaggcagcaaggggtcccgtgccggcccgcctgcagccgccgctcctggtgaggcgggtggtgccagagggccctcgggcgagatatcagcagcacccgtcacagcaagtccaccgggcgcgctggctggtcggggcgtcaccgcacgtgcccagcagcccagcgcacagacacgcgtgtatcgcttcctgccctatggccacccgttcgcctacatggccgtgacaacgcccgtgcaaagcaatgatacaacagccacacgcccaaccacctatgctgctgccgctgcctccgcagccccaccggctggcagcctggcgcccgtggatgaggaggtgtatgagaaccagcgctacatgccgctcaggggctggggcgcgggcaacctgctgcctacggagcgcaagcgctacagccgtgccggtcacagctacagcaccttcccgctggtgccgctgccgccgggttgggaatgggaggggccgtggcaggccgagacagcgggtgagaggttcagtgtgtgtcaatagtccctgactaagctaaccaacacacgcccaaagcacgccccaccgactcgcacaaccagccccctgcgcacaacagtgttctgtactcccttggcctcacaccgcatccacgacctcctgcttcgtgccgcgagggccggtttgcaccgtgtattggttgttatgcatgcgatgaagcctgtctcgtgagccgtacgctttgtgcctgacaccgtgacagcaccgagcgcacctagtgtcttgcactgaaattacgtgtttgtcgtgtgtatccccgtaacttgccctccaccctcaggccatgtggaccgcgacggctggttctatgccctggactggccgctgctgaggtacccgcccacgccggagcaggcgcggcgcaaggtgaccgacctggtgcggcggcgccgctggttgcggcgacgacgctgggtgggtctggccggccgcggcaggctggacagcgctgcccggcggctgctgggcactgtgcgccccggtgagcggctgccgctgccgctgggctgggaggctgagggcgtggagctgcaggtccggccggtgctggagctgccggcggagcccactgagctgcagctgccgccgaggaacccggcaagcgcggggccaacgggcggtgacacaggcggtggcggcggtggtggccacgacatgactgttgcggaggtcaaggcagtgcacgagtggagctgcggccccacgggccagagcggcctgctcatgacgtgcatggacgagggcggcgcccgcctgctgtgctgcaggaccactgcggtgccgcagcagggtgcggaggatggcgccggcccgatgcaggctggggcggtagggccagcagctgcggcagcagtggccgcggctgcagcaggcggcgctgcgtccgccagttccgctgccaacagtgcgtttgcggacctggccacaatggcaccgctgtccgcggacatggctgtggctgcggggcagcagcagggcaggcagggcgagttggacccgggtcaagccgcctggctgagcgtgagcctggagtgcgaggcgctggtggccacccgggcgggccttaccgcggctgaggggggcgctggtgcgccaggcggcctggacaccctggtggactggcgcctggtggtgcggccgcccctcacactgcacaacacactgcctgtgacaggtgagtaccgtgtgcaggagctgacccacctccggtgcttgttttcaattcatgacctgcatgcgtatgcgccatgcgtttggacaacaggtcgctacgtggtgtgggagcggccgcgcacgggtggtccgctgcgtgttcggcagcagggccgtgtagctgcaggtgccactgcgcccgtctacaccgcggacatgcgcatgcaggtgggggctgcagtgacggaagggcttggactgcgactggcacgtggtcccgacctccacctcactgtaacatggccgcaggtgtttctgtcgtttgcgcctgacggctgcgagtatggcgaggcggagccagtgctgctgagcgacggctttatgcgcaatacggcgggggtggcaggtgtggcaggggggggaccagtcagggcaaggagagcactgcctgacacgccgcacgcccaacccataagctaaaccaatgcattccatgctgaaccacttcatgtgcagccgcggcgcgactgcccgatggcttccgctgcacctacacgcattctgcctccttcactccgctgcgtatcaaccttatccgcgacgtcgatacctccgccgcctcggggcccctggcctcactcagcgtggctgctcgcaaccctgccgctgcggccgccaacacatctggcggtgcggcgccggcacccggcgaggccgtggccggcggctacccgctgactgtgtcgctgcacgtgccgctgtggttcgtcaacgccagccagctgccggtcagctgcggcgtcatggcgctggcagtggagcaggaggcaggcgggccagcacggtcggaggactcagccatgggtctgccgcggtttgggccagtgagtatgcctgcccagctcctttgacgaggcagcgcactaggatagaagcatgccaactcgaatgagtcatggcgtcgcatctgtgtaccctcttccctgtgcggcaggctgtcaacgaccaggtcctgcgcatcatcgacaccgaggccttccgcaactcgccccgacccaacggcgccgtgtcggtgctgccgcgctcactggagctgctgtcctacccacccggactgcccaacagcatcatctacggcccgccacccagccaggaggccggcaacgcggctgtgcaagtggccatcctgctttccatcaacggctcgcgctggacacagcccatctacttgccgcgacctggggagcaggcgcagccgtccaagcggggtgtgggtggcgtgctgctgcccaatgaccgcatgctcatccgcgcgctggccaaggacggctgcattcacgaggtggctctgcgcctggagcccgcgccgctgtccatagtggcggccggagcaggtcccggggcagctgggggcgggggtgcgggaagtgcgggcgccaccctggtgcggctggaccaccacctggtgctggccaacagctgcggctacccgctgacactgctgcagcccgatgcggcggcggcggagcgggaccgggaccggacacgtgagtggccgccgtgaacagggtgtgcccgacctcgcgagcgtgcgcaaacgtgttacggacaaacctgctatgcggggcctatcgctaacttgctatggcgtctcccggcatgcagagtcaagccagtcgcgcgcctacggcggttcagcggccgcgcagcgctcgggagccgctcctgcacgcaataacacagcggcaaccgcagtcgggctcacaccggccttgacgctgcagctacctccaggtggggctttggctgcaagcgcgtgttggtcgcccgtcctgccgatatgtgtccgcgttgataggacctctcgttttgctctcatccgtaggtgcgctgggcagtccggtgcactgggccgctgccgccgctggccgccgcaagttctgtctggcgctgcctctggctggcgagacggctgcgtccgcctccgcctacgggctgccggccagtgtgatgtggagcgagcccatcaaggtggacctgcccggcggccaggacacgcaggtggggcagcgcagtggggacgcagtgagaccgggttatggtcacgttgctcattgtgtgcctacgtaccgtagccttggcgtcccgagggccgctcacagaacctgaactcccggctgggctgcaggtggccatcccggtgtactgcctgggtccggtggggcgctaccactcggcgcactcgtccagcccagccgcgggcgccatggcgaccatggccgccctggccaacatgacgccgcagcagcaaagggcgtttgagctgcagagggcgcacgtcgtggccaggcagatgtttgcagggctggtaggcggcgaaagcacaggccacgggagtggcatggaccgcgccgggagtgctggcaagggcccgcagccgcagggcagcggcggcacgggtatgctgctgggtccgggtgtggggcctggcctggcgctgttgtcgcagggcagcgacaggaaggatgccaagaaggaccacgaggagcagcatgccgccgcccggggcccgtcacggccggccctggagcccaacctggtccggctggtcaagagcactgacatcggcagcgtggtgaggcggcacaggggaggcgcagatgaagggacaacacgcggtacacggcaatggcggatgttaaacgatgttggtcacatgtgtgacatggttgaaatttgagatgctctacgtctatttctttctattgtcttgtcactcctccggaagcactatgtattcactctatccgggctgccgaagccaagcaggccgtgagtacggagcgcgtcctcgcggcttttgggcaaccctggcgccagctgccgaagggccgccgtgcccgaggcccaggccaaacatgtcgagagtctcgggacactgtgcgcgggacactgacgcggacccattgcgtgacaagccgcctcctaagcctcgcacattactctacaccatacaatatacacaaacgcccccgccacacagcctgaccattgcgggcgtgccggacactgtcttccctatgccgcgcttcctgccctttctcaggagtttttggctgtgctgcttaacgtgcgtgtggtgatccgggcgcccggttgcctggtgctctgggcggcctcactgggcggcctgccgcagcagcttatcaccaacgcctcgccgctgccgctcatgtggcggcagtcgcacccgcgggcagcatgggcacgtgtggagccctacagcgctgtgtcggtttgcaggggcgtgctgggcgatgggtggggctcgccacccgaggtggaggtgcgcgacaccgagccccagagcgagagtgagttgcgcagttgtgcacgggccggctacttgtaaagcgaagttggctacgcagggttgcctgaaccctgacctagtgcttttgctgccgcggtcctggccgcagacatgctgcttctcacctttgacaccgcctcgacttccacgacaagcgctggcggcccgtcggtgcggggcgccggcgtgactggtccgctaggtgccggagccgcgggtgacagcggtcgggcggttctggcaggcatgctgcgtgttggcgccaaccaccgcgagctgctggctcaggtgcggtcgataaagccgtcataattggacaacaaggacggttaagatcacgtccctaccagtgaagggcgcagtgtgccatcgtcagcgctgtggcatgctacatcgctactggcatgtctcgcaacatacccatgccgcctcgccatgtgcacccaggtggcgcccgcactggagctggtgctcacccctgacggcctcaacaacctgccgggaggcggagcggcaaaccaggggctgggcgcgtgccgtcttgatgcagcgctgaggatcgcgccggctccgccgcccattggcccagcgggtgccgggccccgcgctcccacgttcacagggccttacctcacgccagctgccctggccggcgtgtctcgcaacaaccggggcgcggttgcgggcgctggtgccggcggggcagcggctgcgggtggcgtgggtctaaacagcagtgtgcaccttagcctggaggtgggcagcctggagctcagcctcatagatgggcggccggaggagatcgcggtgctcacgctggacgggctgggtgtggaggtgtccacggggcggtcggctggctcgtacgacttctgggagctggggctcaaggtgcgcggcgtgcagctggacgaccaaacgcccggctcagcctacccggtggtgctacagccgctggacacaaccgcggcggcggcggcggcgcgggcgggcagcggcgagtgcatgttcgcgctgtcctattgctgccaggtgcgtgactgcaggggtgagcagtacatagcgggctgaaccacaatttaaacccggtaccacaattctggcgcctttcctaagatttgttcgtctttcctgtacccctccgcagcccggtaagatgcgctacgctctcaactgccccatcatcgccgcccgcctcctgcctctgcgggtgtctctggctgagccgctggtgtggcggctgtatgggcttgcgctcagcatcgcaccgcccgcgcccgctgccacagccagtgcagtgcagccgcgcggaggcggccgacaccaggtagggggtgcgggcaggtgccagcaggatgaggcgtaacatgtaggtaccgtattgccatgtgcgatatctgtcgccggctggcaaggttcacacatgcagctataagtgtgcctggtgctacacgcgccgtttacaaatattatttgcgatcctgctaggcattgctcacttctttaccttcgcctcccctgcccttttccgtccgtgccactcaggtgtcggccagtgacatgccgctcgccattgacctgatgtgggtggaggacctcagcctgcgcctgtccttccgcaccgacgcctccagccgcccccgctgggccagtggcggcttcatccgcctgggtctggacctggcgcagctggaggacctcgcgctggtgctgccgggtgagcgccaggcggcggcggaggcgggaagccaggggagagaggggaagatgtcgtggcggcagaggcaggcccccccccctcatggtcttgtatagagaatgacttacacgggaggtgggcctaccgacacaggtgttgcttgacgcctggtcatttccgtcaccgtccacttcgcaggtatcgagctggagcgcgtgaggatgccgcgctccctgctgctgcagcaggtcttcacgcggctacaggtatgggggtagctccgactggcctgcgacgcagtacggttgaggtttcccaggggtcttgctatttcctttccaatctctccaatgcgtcctcctacctctgcaatcccgcatgctcacctgacaggaccgcctgttctccatcgttctggcggtcctgcgcaattacggagtggtgggcggcctcagcaaggtgctggccgtgtcgtcacaggcagcagcgacacttgcagcggacggtgggggcagcggctcggcccgtggcggcgcggccgggggtgcagctggtggtggtgggggcggtccggccagtggcagcggcgaggtccgtaacctaggttccggtgtggtggagggcggccgcgccatcgcccgcgggctgctgcagggtgccatgggcatcatcacaaagcccgtggagggcgcggagcagggtggggtggcgggcttcttcgaaggactcgccaaggtaagattggggggtgcgtgtgcaggtttgaaagttgtaggtgcggattgtcgttagcgtgatggatgcaagatgcgatccaatggaagcgcgcctgccgtgctgcgaaacagtagcggatgctgtattaagccctcctgtcttgctcagggcatcgtcgctgcgcctgtgagcgtggtcagcggcactctggctgccgcaagcaaggtgacggagggtgtggacgccacgacgcggaatttacggggtgctgcagccacggctgtgggcgccaagaagctgggtgctgcacgcaagcgactgcagcgtgccttcacaggtgagggcgtcttttgctatacagcccagactaccatatgaccaactctgttagaaaagggttcggacgcacggtgttacggttgctccccaatggctgtgccttgatgtttgctgctgctgctgccctctcatgctttcctcctcctccccaggcgacaacatcctgcgccccttcaacttgcacccagcactaggccaagcgctgctctactcagtcgcggtgtggctgggtggcccaaaacccggcgggtcggccgcaggcggcagagctaccgctgcagcacagttcggtacttcgccttccatgtccgcagggagcggccgttccatgattggtaccgctatcagctccaccatcaacagcaccataggcgccctgcctgtgcacagcctgatgagcatgagcggtcgcgccagcggtcggcctgacctccggctggaccgctatgaggagcactgggtgctgccggggtccgtggtgctcatgattaccgaccggcgagtgctcgccatgcaggcgccgggtgagtttagaaccagggccgtcaaggaatagcctggaatggttgtgcacgacatgcaacggaaagccagtgtgtgtaccacaacacgtcgtgacatggctgttggctgcttgggcttatgtcctttcacagagtttgtggcactgcagtcagctgtcctgtccggtgagaccacccatgtgacggacgtgcctgtgggcgacgccatggtgttgtggcacctgccatggccagacatgctgtctgcggagctggcgtggcacaacaggacgccttccacagccggcgccagcaaccctgcaggcagcaggtcggcggcttcagcagcagcaacctctgtcgctgcagccaacccgcccgtgggcgctggtggcggctctgtggcgatgccggctgacgggctgctgctgcaccgcaagtacagggcggaggacgagcagctgctgtacgatgtgcgctgcaggtgattgggtgccttgcggcagcgggcgggcaaagctgttgtggctcagcttgtgtgaatgtcttgttgatccacatcattgcgtacctgcaataccatcttcttctacactcatgtgcaggcccgggacctcccaggcggcggaggtgctctcgcgcctccaggaggtgcgctaccgctgctatgtgctggcgcggcagcaggagcgcggctggcgggacaaccagagcagtgtgggcgtgtcgccggtggcagcagcactggcggcaacggcgagcgggcacccaagcagtggcactaggaccacagctgctagcggtgcgggcggcagcatcttgccagacaccatgatcagccaggagttcaagctggtgtggcgctccccaagcacccggctggccagcagccgcgcagtgtccttctggcggccagtggggcctccgggctatacaatgctcggggacgtagtggtgttgggccgcgacccgccaccgcggcctgtgcgcatgtacaaggacgcaccagctctggctgctgctgccgtgaatgccagcggcagtggtgatgcgccagcctcggagggcccccgcttggcgcctcctgtaggctggaccctggtgttccgcgacagctcgcagccaccgctgacgctgtggcgaccggtggccccgcgcgggtacgtggagatggggtgcatcgcctggccggagattgaggagccaccgctgggcctggtgcgctgcttacggcgggaccttgcggctccagggcgggtcttcgagagcgcagtctggggagctgccagctcggacaatagcttctggcgtgccagtgtgtggcaggtggatgcggctgcaggcacgtttgtcgcggtgaagggcgatgcaaagccggcacccgcgctggtgagggaggcggtgttctaa

SEQ ID NO: 49 - DNA, 9153 bp, Chlamydomonas reinhardtii
  misc_feature (4092)..(4191): n is a, c, g, or t
atgccgctatcgctccagcctgcccgtcaagggcttcgagcgcctgctaagcaggtgagttggctgagggaacgacggatggttggtgttcgtcgaccatgtgcaagcgtgcagagccgcgcagttgggacccagcagtgctagggagctgatggatgtgtatacattgcgcaggctcagcatgcgcgctccggaaagccagtcctgaacctgccgcgcggtaagtttcgggcgctctgcacttgccgaggctgagaacgagccggcaagcacctgtgccagccctgtttaccagcagaattatacaaactcacatcagaatgcatgacgtccagctgggagcggcgtagtgggaaccgcagaggtcccagcagaatgcgttttgtcttgtcgcaatcgacagcccgccgggtcgtcgccgtgcgcgccctgcccggccgctgtataccgccagacacaatctcccacgatccgcatcatacggggggaatccgctgcggcgatgggtgttgcgtgcgttcagctggcaagcacggctggcgcagaccacacaccgcgtctggcttccgcgcgggcgtgccgcgttggcagggctgtgcagcgtccaagctagccctgcaacaggcagccaacccaaaacagcgcaactcaacaccggcgcaacggccctccagtaacgtcagcccaggggcctgcagcgcccggccttttgctgctgcctgtgtgctgacacgcacaacgcctgaccgccgcacccgccagccgctgcgccatccctccttgcaccgcgcccaacttcccacacacgtccccggatcccatcacctcgtctcaaaccacctgcggctcacccacaccgacgcccgctttcctgttacatgcgcaggcgccacggtggctgccgcgcggtaccggattattgaggacccgcccgccgcgccgccgccgccgccgcccgccgccgtcgtggaggcgcccgcgccggccgtggcggatgtcgtgactgccgcgccggccagcgccgccgccgatgcgggtgcgtgctggcgggtgccgcgtgtcctggtcttggtgccggggttggtgtctgttgtggtgtgtgtggtgtggggtcgtgtgttccaaacccaactaaacccgagacccagccagcccgtagagcgcgagggaattgtgatcttaacctttgtctaggacgccctggagccttggtcttctaggcggtgtagaccgtagacagtaggctagcgactcgcttaccatcgagtggcacccaagctcgcggcgcgcggtaaacccaacccgctaagagcaaacagagctcaacgctctacaataatcacctgcggggtgtcagagcagcaccggcgccaggtcggcagcgggacgaacatgtggaacgtggaatgtgggaggcaagcgacgcgttagcgccaatgtggtaaagggtgtgggaccggccgcgtgcacgacgttgcacgtgtggcgtggtggtgaagggcaggccggcaggggtacctgaggactcattcagggctggaggggacgggaggacagcgtttcctgagtccaaaggttccaagaccttgaacagaaactagagctggggggggccgaatgcgccgcgggaaacggacgcagacccagcaggagaggcgggcggcttggtggggtggcccctcgtgccctggacgctccgcacccgctcccgctccccaggagtcatgggtcgagaggtgacattcaagcccgtgcctcgccgtgccatgtgctcaccaccgccggcaccgaaccacccatgcctgcaaccctgccccggcctgccccctgctccgcagctcccgccatcgctaaccccttcgccgccgccatggccgccgtcagcgaggcggcggagaaggtgaccgacgccgccaccgacgccgccgccgccgtcgccgacgccgcatccgatgccgtggacgccgtctccgacgtcgccagcggcgccgccgacgcggtcgtggacaccgccgccaccgccgccgcctccgccgcctccgccgtcagcgcagtgacggaggcggcggcgccggaggcggccgccgacgcggtgtcgtcggctgtgtcggacgccgccgccgccgcctccagcctggcggcgcagcgctacctggagatgaccagcaaggcagccaaggtgcggctgaggctgtgggctgtagccagagggctgtagcaccgggctgtagctggagggtgcctgccatgctggcggcagtagctgggctgcagttaggctgtcatggggccgtactgtagctggtggacgtctgactaagggacagaaacacgcgggcggcagtagctgggcagttgctgggcagtagctgggcagtagccgatgtagccaaggtacaaggggaagaagggaggtcaacgccgtgcgcgcgcaaatagcgtgcgctgtggctggggcgcagtatggggaagcagcagtagcagctggcgggttcagggcgagtgcgttgcggaccgacggcgtcacagcgcctcacaaacgcgaacaaggacattctctcattagctagacgggcaagtcaccgctcaccatccatgcccgttcttcccctccctttacacgcacaggtcaagcctggcagttccgctccttccttcgaggcgccctccttctccatgcccgacttcagcggcgtgcagctgcccaaattcagcgcgcccgatctttccagcgtcaaaatccaggttcccaagatctccctgcccgagtccgccggatccgggtccggatccgagggggccggcgccggcgtgacgctacccaaggtcgagatccccagcttcaagctggatctggatctgccggagctgcccgacgtcggcggcgccgccggcggcgccgctgctgacgtcagcgccgccgccgccgcggcggcggcggaggccaacgccgccgtcagcggcgtcttcaacaccgtcagcgcctccgtcggcggcgcggtgtcctccgtcagcgccaccgttggcggcgccgtcagcagcaccagcgccgccgtcggcggcgcgctggcggctggcgccgccgccgtggacgccgccaccggcgggctgctggcggaggcggaccgcgagctggcgggcgtgcggcaggtggggtgatagctggatcactgaagcgggggttacattcatggataattaagaagtgaaggcgtaggcaggtacagtagcggggggaggggtcgtagataccagcccaaactaaacctaacccaatgcaacagagcaggggggcttcgggtggtcgggaccgaagcccacatccaactaacagggggcaggggtgagaaaggcgaggtggctaatgcgaggcggatggtgaggccgtggcggcggcagcgcacccgcccatccatgcagctttttcccacctgtcatgctggtgaacttcgtgcctgcctgcctgcctgcctgcctgcctgcctgcctgcctgcctgcctgcctgcctgcctgcctgcctgcctgcctgcctgcctgcctgcctgcctgcctgcttgatgtcgctgccaggtggcggacaaggcttccgccgccgtgggtgccagcctggagggcgtgagtgcggccgtgggctcagccacagcggccgtgtacggagccctgcccgcgccggcgcaggtgagggggactggaggccaggagggaaggagggaaggaggagacgaggaggagaccaagaggagggaagggtcaagcagggggggggggattgaccaaggcaccgcaggggtgaactcagaaggtgtgcccggtatttcgccgccttaaactctgatcctatctctagtcctagtcataattctgtttcttacaattctgatttcgcctgcttgtcaggtgctggcccgcgacctgggcgaggtggtgggcgccttcgctgccaaccccgcctccagcctggtgctggcgggcctggtgggggtgccgctgggcgccaaggcctacctggacaggtgcgcagaaggggggggtgcaggtgcaggctcaagcagggggaggggaggaggaggaggaggaggaggaggaggatnnnnnnnnnnnnnnnnnnnnnnnnnnnnnnnnnnnnnnnnnnnnnnnnnnnnnnnnnnnnnnnnnnnnnnnnnnnnnnnnnnnnnnnnnnnnnnnnnnnnggaggaggaggaggaggaggaggggggacggagagggcgaggcggggaggaggacgaggagagtaattacacttggtagtggcgaagccactgatgtctagggctgacaagccctagtgttaggtgagcgcgttccacacaggaggagagggcagggaaggggaggttgggtttgtcaactgagccaagacccagaagaggggagggcaggaggggagggcaggacaagcaggggaggaggaggaggggagggcaggagggggtggaggaggaggggggctgggaaggggaggcggggtttactctccaagccgactgagaggagatggggagatggttcctccttgcatgtacgacaacccgctactccccctcctggcccccctgctgctgctgctgccgctgctgcaggtacggcggctacagcggcgacttggcgcccgccgccgtgaaggagctgctggcgcgggaggacgcgctggtggtggacgtgcgcagcgaggcgcagcgggcggtgaggagggggaggggggggagagaagggggaggagggggttacattcatgattaattaaggagtgaaggcgttggcaggtacaatagcatagtagacgcgtggggaagggggaggggactgagacggggaggaaggagagggggagcggcgggagcgcgcggggtttgtctcaagccggggcctgtgcaggggcccggggccggggttgcagagctggtggaaaagcggtacaggatgcactgaagactgcaaacctcgtcagccacacactctgtcgaccctgtccccttgtgcattcctaacgcacacacacacacctgtacacacacgccccccccccacacacacacatacacacgcccacgcacgccctcacatgctcccgcaggagtcgggcatcctggatctgcgcaagagctcgcgctaccgggccgccgcgctgcccgccgactcggtcaccttctcgcccaagtgggccaaggaggtgggcgccagcgccgctcgtgctttgcgtgttggcgagaggttgggagttaagggaagcggagggggggcctgcagggtgtggcggcggacggccaatgccgagcccaaggcagccgaggcccaggccagggttcgaaggcagcccacacagagtggagcaggagggaagctgggacggggcgtgcgtcatggggcgcgtgagaaaccccaacaaacccctcccctggtctgcctatatccccccctggtctaccggctaccacttcctaactaatcatgaatgtaaccccccccccctctgcctctggtacctggtgttccacttctcttccctcactacgacttcgtcttccccctgcccccatccccccttcactcaactaatcatgaatgtaaccttcccttcgcttcttaatcaatcgtgaatgtaaccccccaacccccagcgcgccagcgacaagcagctgggtgtgctgacggcggcgctcctgatcgccaacctgacgcgtgtctccacgccgctcaccaaggtggtcatcatgaacgacaaggtgtgtgcggggggcgtgcgggaggggaagaggagagggggagaggagaggagaaggggagagaggggggaaagaggagaggggggatagaggaagaaaagggggaaagagggggggggcagggaccgacagcatatatacgcagcacgagcaaaggcacgcggcagatagcacacaccgtggaacgagggcttggacggctggaggcgagcggacgcgcagtggcgggagctttggcattgcttcctgtcgctgtcagccgctgccccacgccgcggccccccctcctttactggacatcggcgctttgtacgtgtggggtttgatcactccgtctttcgcttgatcattccgtctttcgtttgatcaccccgttttgatcaccccatccatcttatcactccgtcttatcactccgtcttataactgcgtccttcatggacggccgccctcccgcgcacaggatgacgtggcggcccgcgatctggctcgtgcggtgcggcaggcgggcgtgctgcgcgtgtacgtcatgggaggcggcttccaggtgcggaagaggggccgaggagcgctgtggaggggtgtgggtgggtgtggaggggtgtgggtgggtgtgggtgagggcaggaagctactgaagagggggcaggtggaggagggcggggcggggaaggaggcgttggggcggggaatgggcgataaaggggaaggggccggtaaaggtgggggcttgtgacgcaggagggcgtgtgcgcgcctggttgaagtcaggagcaggagcaggcgcaaggcaagggcccagtcaggcatctgggttcggttgcccagctgccgccaccgctgtgcatcccagctcccatgggctcacgcctggacggccgctcacttagtaacaacttcgtttgcagttttcagtgcatccttttccaaacattattgcaacccccccctgcgctcacaccgaacgtcctcctctgtctgcctcgcttggccccgtcctccttgcctctaccccggcactcacaggcctggcaggctgcgggcctgggtgtggtgtcgggccggaccgagtacgacgcctcggcgctggcggtgttcgcggacgaggtggcggaggtggcgggtgagaggcgcgcgggccaggggttgggaagggggagggggagaagccatgctgccgtgtggcacgcaagggcggggccggggccgggggcgggggcggggccgggggcgaggacagtgcagggcagggcagggcgttcttgcttccgagtaccgataccagcagtataattccccgccgcgccccctgcggcccccgctgctctgcccctgctcctgcacagccgaggtgacgcccaagctgaaggacccggccttcctcaccaccgcactggccacctccagcctggccatctacgcggcagccaactaccacaccaccctgcggtgagcgcgaggggagaggggacagggggtctacactcagggggtttacactcggggggtttacactcatgaataaaaagtggaggcgtagccaggaacagtagtaccgtatagcaggtgggttgttaccggggcgggcaggcggggcaggctgtgggcgggaagtcggtgttggaagggggttaaatgtccgtcggcggcaagtcggtgttggaagggggttggccgtccatggcgtcggagtgaatggaccacagcgggttagtgctggctttcaatggaggcagcccgggcgagcgaggcaagggaatggcaaagaaagcagcagtcgcgggcggggctgcagacggggcggggggtgtcggggcgcaaggcctcgttgggggtcagggatgcaggctggcgggcgggattgctcttggcgagaggaaggaaaggcgagggagcggcaggcaagagaggcgagggaacggcagaagggccgcggtcatctggtgctcacacactggtcgtgtttaggggcgtagtctggctgtggggagcaggggcaaggcggcagggcaagagcagggcgggagggctgcggcagcaatctggaaaggaagcgccacagtgtgggggcaggcaggcacctggccggcgcggcgcgatttgccgcctccgctgccttcggcgtgtgtcgtgtctgggactgtgggaggagaccgagtaccgcctgcagtccccacgcccagcccccggtcctacacctaacttgtcgtggctggcccctcacggcttgctggtctcgcccctgccgcctcacacagccctctcattcctccctcgctcccgccctccctccctcgcccctgccacctcacacagctatgtggcggtgtggggcatcatggctacgatctacgcccgcctctccaagtacaactcgccgcaggtaagtgttaggttttagcgatggagatgaagtggatttaatgaatatattgccaaccccgaacaacatacaaggccggaaagcagcccagggggaagcgaaagagcgaggtctcgccacagcattgtaggacatgcctgtgagctagggaatcgcaggatcatgccgcaagcagtttttgctccacgagttatgggataaccgatgtgtgcagaagacagggacgtggagtgacgccgtgtgtgccctgtgcatgcgtgtgctaccccccccccgtccgcagtcttcagtgcatcctgtaccgcttttccaaacatccctgcaaacccccccccctgcaggagttcctggatgacgtgcaggccggcctagccgccgcctccgccgccgcctccgccgccgccgccgcggccgcgagcagcgccagcagcgccgccgccagccgcgccgcggcgcccgccgccatcgctggcggcgctgcctccgccgcctccgccgccgctgcgccggccctggcggcgcccaagcccgcggcgcccaagcccgcggcgcctatgattgccccggccccggccaaggaggtgtcttttgacgccctggctgcggcgatggccgcggccggcgccacgccagcggcgcctcccgcaccggcgcctgcgccggccgcgcctgcgccggccgcgcctgcgccgcctgcgccggcggctgctcccaaggccccggttgccgcaagcgacacgaccgccagcgccgccccggccgccgccaaggaaaaatcgcctgcggctgcccccgcgccggcgaaggcggagccagcccccaagccggccgccgcccccgcgcctgcgcccgctcccaaggctgcggccccggcgcctgctgcctcgtctgcccctgcccccgcaccggcccccgcgccggcccccgcgcccgcggcggccccttcgtctgcatcggtccaggacagcaagctccaagtgaaggtgtcggtggccccggagggcaccgccagcaccagcgactaa

SEQ ID NO: 50 - DNA, 3677 bp, Chlamydomonas reinhardtii
atggagcgcaattacgcggtaatcttggactatgcagtacgcttcacttgcacacaagcttgagcttgcgtcgatgaagtcaccccgcgtcttctcgttgagcacacacagtctgctgctcacgctgctctctaaacatcgctgcaggggggctactctggaggcgggcagcccagcaacctcgtttcttcaggtgtgtgcatgcccgcggccccgcgttccctccgtgctcgtcgtggaagcgcgtgatggtgaaccaagccgtgattcattgtcagcaagcaagcctgacatcgctgccgcccgctgctttcatcccggggtctcacctatcgttcaggccggcgtgccggaaccgttcggaccggcacgcccgatgccgccccagcggcgggcggctacgcgggcgcaggggctgcagatgatgcggcatcgcaccaggcgcgcttcggtcggcgggcgtcgcccggagcctacccctccggtgggtgtgcgttggtaccagtatgtgtcacgcagcgctgcgtcattccttcatagtgccgctccctacacgtccctacgcttgggcaagtgacaccgtttctgcaccgatgattgtgtatgttcactgggtttatgtccaagcctgcaatgtaattcctcactctgttcataggcgggggcatggacatggagccgccccgcggaggagccagcggctacaccccatccgcggccgccggggcgccgcgcgcagccggcatcccacgctccggcgcggccgcaggcgcctactccgcctcacccgccgcgtcctcagcagcagcagcagcagcagcagcagcgccacccccaggggcggcagcggcaggacccagtagcaagctctcggggctgcagcgcctgaaggaggcggcagcgtctcgcctggtcagtcgcatccccagtggggggcggcatgcgcctggtgagtgaggaggctgcgggccgaggattcttgtgctagcaggtagcagcatgggttgatgtgcacatgtaacggatgtgggcatgcgtgccagctcttgtactgggtgcagggcgttttgtgtcgggtggcggacctggctagcgcgaactctctcaacccactaccggccttccccaatcctcttcccgcctctgaattccttgcagagtctgccgggtacgtgccctcagccatgacccaccaggccccggcccggcctgcgcccctgcgtgccggctctggcggcggtggcggcgcctcctcgggcacctctgctgccggccggccaccctccactggctcctcaggctacggctacagctccagtgctgccgccggtgcagccgcgggccggccggggtcgggccggagcgcgtccactggagccgcgcttggcgccggcagcagggcacccggggcgagcagcgggtacgggtatgggtccagtgcggcgggtacctcgtccacctcggcgagtggacggccgccgtcagggagcggtgccgcgtccgcggctgcggcgtctgcagctcgcccctcggccttggcgtcgctggcggcgcggcggcagcagacggcggagccggcagcggctccgccgccgcgggcgcctccggcagcggctccgccgccgcgagcgcctgcggcagcggctccgccgccccgcggcctttcaggccccatccgcgcgccgccgccaccagccccggcgccctcgtatggcggtggtggtggaggctacggtggaggtggtggctttagcggcggcggcggcggcttcgatgcgggtaccattccgccgggtgcggacgaccccggcccgacgggccccatggtggagtgcccctcgtgcgggcgcaggttcaatgagcaggcctactccaaacacgccaaggtacggcatcgttggtcttgcacgagattgggataggaaataggcggtacgcacgagcagggcataacacatcgctcgtcatgcgtggttgggatgggacggcgacaagaagacacgacaaggtggttacagctgaaacggcattgctgcgggcgcagatgtgctaggaatttccgggaggcgcttttgtgcttagtcccttaatcttgctgtcgccctcgttccgcatcctgcagatttgcgagaaggtgtttgcccagaagcgaaagccggtcaacatggcagctaagcgacttgagggtgagcttgggagtatggcggcaggcagcgaggaggttctgggttgtaaggagcgacggaagtggtcaggcaagggggctgccacacgaggcatgcacgacacgaacacaccagtcttccccagtcatgatggccaacttgtcctccccaacccttcaaccaaagcccccaactctggccttaccttgatctgtccagcacatcactggtgtcgcctgctcacccacccaaccaccacccaaccaccacccaacatcacccaaccaccacccaggctctgaggccgccaagttcttcgacatgcgcaagggggtgcccaagagcgaggccaagggggcggcagggccacccggcaaggcagcgcccggccgaggcgcgggggctgctggcgggacgcggctggacgaccggccgctccccgggtccaaggtgcgtgtgtgttgcggggtgctgagcggataggtaggtgccggctctggacaatattcgcacctaggcttgcgagcatggggttctcttcccctgtgatcacattaccaactgccactgcgcaaacgacgactgcaactgaactggctaggtgtcaacaccccacgtggttgtgcccgtcctgggccttccctccccttccgcatcctctcgtcctgtgcacctgcccatctgcccgtccgcatgcccctacccccagatgcccaagtggaaggcccagtccgagcagctgcggcaggccatggccgcaaacaagaggatcgcggacgcggcggctcgcggcgtggacatcaaggtgcggggggccgcggtatgctggaaatcgcggagcggtgggcctgggccaggggccgggttgcatgggatggtgatagcacggggcttccgcgttccggttggtcagggtgagctcatctgaatgaccagggggggggggggggggcggccaaggaggcgttgcatgacgggcactcactcggtgtggccggctggggacacataccgtatacgtgcagagagatatcgtaaagcatgagcgctgttgatatgtaaaaacttacgtttctacggtactggttccgcaggatgtcaagttcacgcccacgcccgcagagcaggacgaccggtgggtgtggggtggttgggtatggttgtggtgggtgtgggcgtggtgtctcgcggagtgtgtggacagggccacgctcggggcacagcacgcgctaggtttcatttgcgtccagcgcgcacatgccacacaagccccgcctcttgtcacttcgcgtcctcgttacggtattgatgatgctcgtaacctcaatctgtcactcactctatccatgccctgccctttatcaaacccttcacagcgtgccctgcccgcactgtggccgcaaattcgcggagctgaccgccgaacgccacatccccaagtgccgggacatcctggccaaacccaagttcctgggggcaaagagcggacgcggcgcgcacgtgcgccggtag

SEQ ID NO: 51 - DNA, 2072 bp, Chlamydomonas reinhardtii
atgccttccaagcgccctcgctccgggcccgccaatgtcaagccgactccaacggagctccatgaggctgtcttgaaatgcactctttgcaacaagctcatcgacccagtggatgactaccggtgagggcctgtcgcgtcacacacgtcgcgtgtgctgaggtgctggtcgtttcgcgaagcacgtttgtcctgtcattgattccattgttcaattcccttgaatcccttagactcagtatggattcttccgtgagcgtacgtctggttgccgccgttgatttcgcgagccatctctccctcaactctgcctgcagagacatactactaaccgtgtgaaaatgctgaccatcaccgtaggttgctggactgcggcgtttgcaatcgtgacgacaattgtgtccacgaagactgcattggcacgtacctcaagaaggaaggcagggaccaagctcagaaggtacgtgagcgcaggggtgtaacctgcattgtcgatgcacagtaggctgctcacaagtatatttgctctgggctcgcacccttgtgcggcacgcaagtgtggggattaggccattagggaacgaaaaagcacctgcgtgccaaatccataacacaaaatacatgctaaactcccttcttccccctgctatccgccccctttctgcgcagacgggcttcaagtgccctactacacttgccaatgggaagtcctgcaagggccacatctccaaatcccatccccatgtggcaagcaatgagaagaagaaggaggcacgcagggccccatcacaaccccgccacaactcgaccccccatggtggtgccactaaggccactgccaagggctctgttgtccaggctgtcaaggctgccatgacacagcagcttgtggtcaagccatcatcaggacccagctccacccgcttctcccctccccttcctcctgcccaaccaagcaacaacttcacgctgggtgacttcttcacctgggcgttgcctgctgccccttctgccaccaacacaacgcctcctgcccctcttcctactaccacaacctcctgtggcaatgtctggctggatcgcacccgccaggcttatgccaagggcctgactgtcccccagggacaccaggcccagcaggtggtcagtgcagagacacagctcctgcagcagctgagcgagcgcagtgaggaggctgaggacgcggttagctttgactctgctaacgagagcctcactttgtccgccaccagtgacagcacctccagcggcaccagtgtctccgtccccagcagtgccaccttgtgcatgctgctgggcaacctgtccttggatgcgcccacactgctgggcagccctggcaaccttggctcccacctgccttctccttcaatggacaagccccaggttcaggagctggtggtgcaagagctggaccaggtcagcactgtcatctgcagcaaggtggccagtgtcaccaccatccgcaacctgatctgcagtggccagctggcttggctgacacccgtggccacagaactgcagcaggtcatgatggcagcggcaggtggtggccaggtgctgtactgcagcctcatcaatggtgatggcagcagcagccttcccaatggtgacacaactgaccccattgtggctgtgcagcctgtctttgagctctccatcacccccaccagcctgcccagctgtcccatggctttggacctgacccagaccatgggtatgaaggtggttcgtgacccttgcaccctggcctgctacaaccctgaagactgttttggccctggctacagcctggtgggcttcaaggtgctcctgcctgaggccggtgaggagatggagggttccaacagcagtgtgtccaagcagtctgtagtggcccagggtgtgcctatccgccgtagccaaatcctggcagcaggtggtatggccagtgccagtgaggccccccaggtggccattggtgccaccccggttagcacccagtccttcctgactgagtcagatgatgagctggctctagagctaggtcgcctgtgtggctgcagctgctga

SEQ ID NO: 52 - DNA, 930 bp, Chlamydomonas reinhardtii
atggccctggacgcgggtgtgatgtcggtgacgctggagtttgccaaggacctgaaggacgcggactggttcggcaagtgagtgtttacttgcgtccgtcctcgcgccatcccgttgcacaacgggcgtccgcggcccggccccccgccagctccccgggcgagccccacctcccatgcatatgctgagaaggttgaaatggaagcgttgactctaatgtctcatgtgctctgagccgggacgccctttaggagcgccccttcacgcgctatccgattggcactcagccctcttgcctcgttacccggctcctcgccctacccttccaggcaagacccctactgcatcatccgcatcggtggccagaccttccgcacgcgcacggccgtggacggcggccgcaaccccgtgtggaatgacacgttccgcttcaatgtcatcaacgagaacaacgtggaggtggagatcaaggacgaggacgtgggcaaggacgacctgatcggcacgtgcaccttctcgctcgccaaggcgcgtgagagcggcagcgaccgcatccaggcggctgtggtcagcaagaagagccgcaagcagcgcggcttcctctccatcgccctcacctgggaacccaacaaggcgctcaagcccaccgtcaccacacagcccgccgcgcctcactatcactacatgccccacgccgcgcccctgcccgcctactacgccgcacctcctgcctacgccgcacctcctgtctacgccgcgcccgcaactcccatggcctactaccccagccctgcgcctcctgccggctactacgcacccgcgcaggcgcccacgtacgcggcacagccgccgcctgccgcagctgcctacccgcagcagccgcagcagccgcagtacgcgttttatcccgctgtgcccgtcgggcactag

SEQ ID NO: 53 - DNA, 1034 bp, Chlamydomonas reinhardtii
atggccctggaagccggtgtgatgtcggtgacgatggagttcggcaaggacctcaaggatggcgactggttcggcaagtgagtattaggctgatttggggacccctgtctatggggcgtgcagggttggcaccatacagctagtgtgcagtgcggggagtgcacaggggcagtgcacgccgggtcgtgtcgagattatccgggaaggggcctgatcgctgacttgggcgagtcgttggaagggcgcgtttagctgggaaatgcatgcaagttcagcgcaatgtgggcgcctcgtgcctcagcagcactcaagtaagccatgtcttggaggatgcccgcctggcatttgacgtcgcgtctgcttgcctcccaacgccgattcgctcatccccctctccgcatctgttgtctggcacttaaccctgttgtcctcgtcccggctcctcgccctgcccctccaggcaagacccctactgcatcatccgcatcggcggccagaccttccgcacacgcacggccgtggacggcggccgcaaccccgtgtggaatgagacgttccgcttcaatgtcatcaacgagaacaacgtggatgtggagatcaaggacgaggacgtgggcaaggacgacctgatcggcacgtgcaccttctcgctcgccaaggcgcgtgagagcggcagcgaccgcatccaggcgcctgtggtcagcaagaagagccgcaagcagcgcggcttcctctccatcgccctcagctgggagcccaacaaggcgctcaagtcaaatgacaacgccgccgccgcccacgcgccccaccaccagcagcagcactaccagcaccccccgccaatggcctacgccgccgcacccccgcccgcctattacgctgccccgcccgctcctgcctattacgccgccccgcccccggccgccgcctactaccccgctgctgcctacccgccggcacctatggccgcataccctcctggcgcctaccctccccagccttacccgggtgcggtgccgccgggccaccggtag

SEQ ID NO: 54 - DNA, 2069 bp, Chlamydomonas reinhardtii
atggcagccaagccaggtagcgcaggcggtgcggccccaccaccagcggcacccgcgcccccgcctgtgctggagaaaaagaccctcgcggagagccggttccttcggttcgtgaatgtggactacgcacggccaggggacaatgccaaggcaggtctggggctttcggagagctgcgcacttcaaagccgtgaacccgtgcccgcatggccgaagttaagtggacttgcgctgactgaacgcctttgcctgccgtagtcttcatggcaatacgttgagcggacaacgcgaaggggcgacgtagatggtgagtttggcgcggctgtgggccccgtcgcggcagttcccgagcggggtttgctcgccggttcggtgccccttgtgtctcgcagcactctcaaggggctgtagaacattgcttacaatctgctcacttctggaacctgtgtcgccgaatgcctgcagcggtgaacattttcgcggtcctgaaaaagaaggacggcaaccaccaagttctggtggtgaagcagtaccgtcctccgatgggaaagcataccatcgagcttccagcgggtaagcctcaaattaggtgcactgcctgaagaatgctgtttccgacaaaacgaactgaggcgttaagtgcgtccgtatcttgtgcacaggtctggtggacaaggacgagtcgcctcaggtgcggcgaaagggggcggttgacgggacatgcgagcttttcgttccgcacgtctgctgacgcgtgcctgagggctccccgaacgccatgtgcccggtagcatccatataggatggggggcgctggacagggcatcatagctatgccggttacctgccagctgcggccacgctacgccccaacgacctgggcagtaccagtaccgcgaactgacctcagcgccctgcctgcctccctttccgactgccccccacagacggccgcgctgcgcgagctgaaggaggagacgggctacgtgggcaccttcattggcgccacgggccagcaggcgctcagcccgggcctgaccaacgagaacatgtgcgtcacagcagggggcgggggcccatgggtgtttgtggtccccgtggcggccgtgtaagcttccggtcaggagaccagcaagtgcgttcctgaatcatgacaagctgtggggtaatataggcagtgatgggtttgcgttgatgaaggccacagaacgtcacccgtttgcaagcaccatatgcatcccccccccatccttccatgcatgtgcctggtgcccgtgcttgccctctggactgccgcttcggagcacacagggtgagtgtgaggttcggagttggaatcttgcttgagcaaagcacgagcagcactgcgtctctcaagacgggcacgctgctgctgcgctgaccgctctccgcgccactgacacgccctgcttgccccgccatgctcgcatgttgtgtgattcctctttttgaatggacgccaggtcaccatcttcgccgaggtgagcacgtggcaactcctcggatatgctactggctgcgctgcatggggttagcgccgggggtgggagtaggtacccgcacatccgacaaacgatgcctttgttgcgcagtgggcctcttgcagccagccgtgatcgaccctgttgctgccggcctccttatttagtcctgttgctgcctcctccttatcttgtccttgtctttctactccagattgacccggagctcccggagaacaagaaccccaagcagagcaaggaggaccgcaagatgggcatcacgcgggagtggctgccgctgaagaacctgcaccacacgctcgcggcctacgaggcgcagggctggggcgtcttcgcaggtgggcacttggggcggtaggacagggcggcgcagggagcgggcgtggagcagcagcagtgttgttggtactgctcggcctgccgcgccgcgcagttttgccatggcgggcacaagcatgcagcgaccttacgtttctcgttgacccctgcacaggcctgtacgccgtcgcgcacgggttctacctgcgggaacggctggggttgtga

SEQ ID NO: 55 - DNA, 1883 bp, Chlamydomonas reinhardtii
atggcttttcttcagcgactaggctctggtattagggatggtttgtcgtcgttgctaggcggcaaagacgagggcaagaagcacgaagtgggcaatgcgtccccgcagaggacgctcgcaaaaatcagcagccgtggaaatcgaccttcttccgcggcagtggggattctagagagccacacgcgcgaagccatcgccacctacgtgcaggcgaagtttgacaaggcaagccctcgctgtgccctggctccccccctttggcgccctgcaccacacgaccgcagcccaacccccgcccatcgcacccctttgctccctcatccccagggcgaggcgaagccgcacatgttcacgcagttctggctgcaattccccaagctggaggcggggtttgaggtgctgcggcgtcaactggaggcgcacacgggcagccgcgacgggccgctgccgctggcgctgctgcggacgcatgcctccgactttgggctgccggcgagctgcgccgtggtgcaggacctgtgcagcaagtcggctgtgcacaagtgccgcgacgtgagtggccttgcgcttccatatggtccggtgtctgggggttgggtcagtaggcacggaggagggttgtcatggtgccagctgaagtccagttaggcgtgctttaggcaatgcaggttgcattacagggaacattaggcaaccactatagccacgagcgcgacgcagcagcacaggcctgcagccaagccggggaactgggccttccacatatggacaccccaggcctcctcacacgcaactcgccctcgtctcctcctccctctctgtgcgcagctcgactttgtgggcctggtgatgctgttgctggtggcgcacctgacggagccggccgccacctgcgccagcctgccggaggacgtgcgcaccatgctggactgcctggagctggcgttcacgcacttcaacagcgcgcgccggggcaagctggacaagcgcgaggtgaggaggcggaggaggcgtggaagggaagaaggcggttgagatgcggtttggaggcgggtggaaggcggaggctgacgggtagcgggcttgaggagcgcggagctatcggctgggttggaggcggagaaagcgcctccacgtcgcttggcgttcatgccacctggttgggggactgaaggtgctgttctctgacggacaagacacgtgccgctccccttgtggttgggctcccgcatcacacacgtgtggcgcacctaccgtacctgcaatacgctgctggtgccgacccggtgctgccgacccaccccaggtggctgaggcgctccagtacgagagcgccaaggcgcacatcaaggagggccgcggcggccgcaccagcaaccgcctggcgcacaggctgttcgaggggctggactgggaggtgggtggcgtgaccgctggagacggccggcttgaatcacgggtggcggtgggcagagacagggcagagtggcacagaagaggtttggctgccggagcccaatgcaccccgtggagctccgcgacccagctctgacctgaccccggacaaacgctggaatttcccctccctgcagtacgacaacaccatttcgttcgagaacttcctgcggggcatcctgcagctgatctcggatgagttcggggacgacgacggcgacaatggcgacgagtacgtggtgctgacggagacgggcgaggccccgccggacggcgccaagcgcagcggcagcgtgcccacgacaccgggaggcacggcatcaggagggtcgccaggagcggcggggcaaccgggcacaccggggcgggtgtggggtgcgagcgcgagcggcatgggcggggccgcggcgccagccaatgtcgcgtaa

SEQ ID NO: 56 - DNA, 3612 bp, Chlamydomonas reinhardtii
atgtctaaccgcgacaagctcgcagtggtctacctggtcaccaacacacactttaagtgtaagtgggtatgtatcagccacatcagggcattttggctagcacgtcaacctccactgtcgccttcacagcaccccaccacccagcacgacccaaaccccctgatggtcgcttgccctgcgtgtctctttgcgcctcagccaccgaccgcattgcaatgctcgctgcctcgttacggctggcggaggcgcacgtgctgcccaccacccccgccatgttttacatcttcacctcccccgggtctctggtggagctgcggagggcgcttcgacccctgctgcgggtaggtgccagggcacgggccacgggttcgggacgcaacatacgatagccagataaatgcaggcagtcgcaactctagcgaaggaaagagtactagagtagttacgggaggcgccttgcatagtgagttggcgggccgcaggtgcaagcggcacaggcgggcgagagaacggcagtaccggtagcaaggcttgaggcactgtgcgcctgtgcccgagtggcgaccaggcctcacccccgcatggcctcaccgcgcccccacatggccgcgccgcacactgctgtgcaaggtgctgagcatacgcttccccctccccttgtgccgttgcgtgtgcgtgcacaggcgtctgccgacagcggccacatgcaggtgctgccggttccggacgacagctggcagctgccggaggcgggcaacgacacagcctactggcacgggtgggaagggctgccttgacgacgactggaagcgcagtgaagggtttttacacatggggtgttcaagggagtccttccacacacccaaggggcaacaactgtgcaagtgtgtactctgccacgctgctctgaataaacatttgcgggtttgggtgggagctgtgccctgccgcaaagacacgggcaatggcctagcgggtttcatgacacgccgtgtgtgcttgcggccgcttgctgcccccaggcattggggcaagcactatcgcctgatgggcgactggcggctgagcttcatgccgcgattcgccagggacatgggccaccggtgaggggggggagggaggggtgcggggtctggaggcacgtgtgcgtgtatgcgtatgtgcctgtgtgcacgaggtgggagcgggtgagaggtgtggggcccatcacgcggccgcaatgattgttggtttcggcttaccgtacagtacggcactcgtccctgccactcgaggcaacgggcttgttggctgagtgctgcccagcccaagtgcaacggtcgcggccgccttgcagccttgctggtcacaccaaaatcgcgttgacaaacccgttgcgggcaggtatgtgatgcagctggatgacgattcctacatcatcggcaaggtgagcctgtggtttgggaaaacgcatgtccttcttcaggatcaagaccctgtgaccgcgacagcctttgccaggctgtgaccttgaggtgctgcgttgggtaaccgcgcccacgctgccaccgcccgaaatcaactctaaaactcgggcacaagcagctcagcagcagccgtactctacatggccacttctgacatctccctcatccgcattgcggtccccacggttccgtctcgataggtggaacagaacctggtgcagctgtttgactcgcgcaacatcagtctgggggctcagaaggtgctgcaggactggccgctggtcacctggtgcgtgcgtgtgtgggtgtgtgggtgtgtgtgcagcgtgtgtgcgggcgtgtgtgcgggacgtgggcaaatgtgtgggtggtggcgtgggtgggtggcctgaatgtcgggaggcggcaggcgcaggcaatgcgggcgtcggctgtggcttgctgcgtgctggctgaggctcgtgctcagggcttctttcgtggagccaacaaccactaccagctctttttcctcctcgggtcaggcatgagaggctgcggcgctcgtggcgctccctttccacgcccgctccactaaacgcacctaaaaccaaaaccctaaacccctaaaaaccccacacccctgcctccgctccccgcccgtcccgccgcgccttgccgccctcctccccactccttcccccgctgacctctagcccccttccccaacctaccgcatctccacgccacgctgcaggggcctgcccgagctggccaagtacttcctgttggcctaccagctgcagcccaccacactgttccagcactgccggccgcccgggctggacggactgtactcggcgctggaccaacagtcggtgagacggggtggcgctgaggaataggggtgctggggaatgggggtgctgaggaataggggtgctggggaataggggtgctggggagtaggggtgctggggaatgggggtgctggggaatgggggtgctggggaatgggggtgctggggaatggcggtgctggggaatgggggtgctggggaatgggggtgctgagggcggcggggaaggtcaacgggtcaaagggtccagtggtgcggtggggggagggggcggggggcgttggaccggcggtcagtgagagggggcggcaggggcgggtgctgagggcgctgaggagtgagggtgctgagggtgctgggtggggctcgtgggccagggcttagaggtcaggggttgccgggatgcggccgtgcgggtggggcgatggcaggggtgcgccatgtgcacatcacgtcaccgcatcccgccgcatcgacgcatagtccagggaacgagcagcgggcgggccagcgaagggtggcgccataaacaatcttccgagcatgctcgggacctctcaaccctacccctctctctttctcgggcctcagctgctctcgctccaccctcttctttacccccattgggcccgggcacataaacccccgcagctggatgcagacccggaggcgcgagtgctgggcagtctgttccccaacaaggccgtccctcgctcgggcggctgggaccgcaccatcctgaacggcaactgcgtcatgatcagcctggacttctggttcagcagcctggtgcagcgcttcgtgcagctgtgccgcgccagcggcgggtccgtcatgtaccgatggaacgagcaggcggtgctgggcatggtggcgcagatattcgcgagccaggagcagctgctcatgttcagcttcccgtacgcgcacaggtgcggtgggggcggggcacggcgggggcgttgcctggtggagttgttgctgctcacgggatggggtggggtggggagccgctgatcacgggatggggtgggatggggagccgctgatcacggcatggggtggggcggggagccgctgctcacgggatggggtggggtggggaactgctaatcctgcgggtgggctgcggtagtgtggtgtcatccgcgacaggcaggtggttggctgcgtggggcagcgaagcaaggctgtggcaccggcacaacgctgtgtgcgcgcccaacccgtgctgcgtgtgctcgcttgcgtgcacgtgcaggctcaagtacaaggacgcgttgagagcaggaggcttaaagccataa

SEQ ID NO: 57 - DNA, 2081 bp, Chlamydomonas reinhardtii
atgggactttggatatctaaactgtggtcgctgttcggggaccaagaagctagaattctcgtgctcggtctggacaacgcaggcaagtccgggagcccctggtaccagagaaacatctaatagataggctaactgtaatggggcgcaaaacctcagtagggtagctgcaaccttctgggatgatcgagcaactttgcctaacccgcaagtccgctgcaccgcaggcaaaacaaccattctataccggctccaggttggcgaggtggtatcgacaatccccaccatcggtgagcagtgccgctggctcagtcggctcagcgggcacccgcgggtgcgggacacacgggttcacctgcgactgcccgtccgggcgcgtgcactggaggtgcgacgcgccagccccggtaccagccgcttacaaagggcactgcaaccatcggcttcagccctcctcgccgcgcccttggcgcttcagtgtagtcgcgctcttcgggaacttgccgtagcaaatgccagtcatagggacgtccgggaagcttggtgctcggcggctgccgcgccactgccccgcaccgcactgcgctgatgcggtcgccgtacggtagtgtcatcctggccagctgcgctggctgtgtgggcctggggcgtcggcgtcacgtcagtgtctggcacgcagccagcggacgcgaccaaacatgaccggaaccggaggcaaacacacgcgcctgctctggagctacaccagggcgccatgggggagggggcagcagcagcgcagcggggcatcgtggcggcggggacattgtggcgggttcagcggagcgcctcaacacggggtgggggcagcacatggacctacccgacgccacatcgctggggtgtgtgggacactcgagcggccccaccgatgcatctgactcctgcccttggcacgcatgtgcgccgcgcaccaccacgccacgcaggcttcaacgtggagacggtaacgtacaaaaacatcaagttccaagtgtgggacttgggagggcagacctccatccggccctactggcgctgctacttcccctgcactcaggtgcgggctgcgcaggtccacccgcgacctaggtcagggtggtgcaaggggggccttcacaggcaggctggcttgttggggcccccactcaccaccggcagccgcgtgcaggaagccaagggagaagaggcaggccagcagttgttggtcatgcttgcaatctgctcgtgagagcgacgcctgggccgtactgtgggcctcctcgctgtggctctcgcccactttccttaccacagctgtcatgcttgccgctcctcgcttcagcctccttgttgccctcaccctgcccccctcaccctgcccccctcaccctccccgcttcccctgcccccctacccgcgccctcaaggccatcatctacgtggtggacagcacggacacggagcgcatcggcatcagccgggacgagttcaaggcgctgctggacgaggaggagctgcgggacagcctcatcctggtgttcgcaaacaagcaggtgggcagggggcgggggtccagcggggccagcgggaggaggagcggggcggtgacagggcgggggcgtgggcgtgggcagggcgaggccagagcgggctcagggagggcgtgacgggcgcttgagcgggttgttattggcagcggctgtgagggttgaagggcgggtgaaggctggcagggcagggaggggcggtgtcataaactcataatggcagggtgctcccagccgcagcccgcccgtgtcacggtcgcggctcgtgccccgcacctgaacccttacacgcccgtctgaccaatgccacaatctattctcctctgccgctcgtactccctgcgaacgcccacgtccgccgccgccgcgcaggacctgcccaacgcgctgagcgacgcgcagattgcggaggggttagggctgcacgacatcaagaaccgcgactgggccatcttcaagacgtccgcggtcaagggcgagggcctgttcgagggcctggactggctggccaacatgctcaagacgcgccggaaatga

SEQ ID NO: 58 - DNA, 10759 bp, Chlamydomonas reinhardtii
atgggcttgtttcgccgcgcggacgggccagcagtggtcgctgaggcgcatcggcacataccgctgggctcaagcctggacacagaggagcacctgccctaccgcggcaactatgcctccacaacgaagtacacgttgcttacgtacctgccgaaggcgctcttcgagcaatatcggtgagcgtgtcgacaacggcgtgctgttcaggggcctcggcgccgcgggccaccctcccggactgactggggctgcgtccgcgaaagctggtccgactttcgcaaccaggtctcataggcaatgccccggcaacagcaccgtaggatagtctcccctcgtggaggcagggggggactggcttttgtccgggccgtgcttccgggccacgcgggctgacacgcggactacagtggcgaagtgactgcacttgttgctgtggccgaatgggtcgccccgggaggcctcaccacgccagcctgcacccaggcacctgaatctgagccagtctgccgtgtcagctgcagccctggcgtgcagactcaagccgtgcaccgcacgcgcccgcaggatacagcggcgacgcatacgttccttgcattcctaacaccgttaattctgcccttgccgcctgcaggcgtgtggccaacatcttcttcaccttaatggcggcgctgtctctcacgcccttcagtccgctcaggtgcggtacacgccaacagctgctgcgccacgccgcacgtggtgcttcccggtagtgcgcttcgaacgcagaagagctcgtgctcaagatgtgtgcgggctggcccggcaaagggctgggccagaggtggccttggctaacggcggcatgcctcctattcagtcctcgcgtagcgggagcagccggaagcgccgtgggtaggcgtggccgtgatgtgacgcctagcgagcagcacggcaggggctcggggaccgtacgtgccgctgcggccgcatggcagcagtgcggcgcaacggcggcacgggcccggcatgacctgtggccgagccgcagcagcgccggtgaaggggaacgcggacgctacagaaagcagggtgtggatgtggggacagctagctgcgcttgagcaccagggaggggcgcagaagggcgtgcgacaaccaggaaacggccacatcgccgcttgcctgcgtttcccccacaaccttataagcaagcacgcactgcactgtccacacacgcacccaagcccccgtgcatgtctttctgttgacgtgcccggcccgctgcaccgaccaggccctggacatgctggacgccgctggtgctggtggtgggtgtgtccatgatcaaggaggcgcgggaggactacaagcgctacaagcaggacagggaggtcaatgagcggcccacgcgcgtgctggacaggaagaccggtgcgtgtgcgcgtgcgtgtttgaaagagatgactcagaagcgcgtcgctggggagctgggggcaggaggcaggggcatggctgcgctgtgggtggtggcccggcctaggcgggttggtgtcttggtgagcttctgctacgcatgcctgggccgaggtgtcacgggccggcaggccgttcgcgccctggaccctctttgaccgccaaggcacgaacccttgtctcacgctttgtatgcccgctgcggccagctgctgagcctagcaagtgtatgtacagaatacaacactgaggggtgggcagtatgtgggatatactggggcggggcggcgggaggggagggcgagggccgttcgaaccgagacccgcctcccgaggggggcgggttgaggtgaggggcggcccgaacccgacccgaccgcatgccccgcctgagcatgccacaatgcccacccctcaagggttgtaagtagcttatacactggaatgggacccgagggcaagcaaacagtctcagcaacacgcaagaacgaacgcaattcatgattttaagctggcggggcgggcagtgtgggggcggggcgggcaatatgggggcggggcgggctatatgggttggtcaaatgttgacgaaccgccacatcgtgcgagctggggactaatggactgcgaggctgactaaccatgtattggtggtcagccatgtaacaacccagtacgagatgtattttgggcaagtgcccagtgcccgaggggcctcccgggttgtaacctaaacgcatatgtccccgcaggtgaatttgtgacgataccatggaaggcgctccgcgtcggcgacatagtgcaggtgcgcacacgcgtgctcgctcgctgtgtggcgttgtcctggggtgtaggctggacctgtgctgcgtgcatttgtgacatgcggccccccggcactttcgctccttcgccgccctcaacacgccggtgatgcctacatacccaccgtgatacatggggcgctgcacgtgtatctgtaactgttgcctgtagctgtagctgtaaccataagtgtgtgtatgtgttgcgtatgtgtgcaggtgtgccgcgacgagtacctgcccgcagatctggtgctgctatccacctccagcgatgagggcacctgctacatcgagacgatgaacctcgacggtgcgtgaggggccgtgcatagtggggcctggtcccgttgccgatcccaagcattgcatgcgctcgtcccacttgctcccaccatcgacgcaatgtggcacggcggcaaccgcggtggtcctcccgtgcaggcgagacgaacctgaagatcaaggccgcgccggaggagacccgcagcctggaggaggccgacctggtgggcctcaacgccatcatcgactgcgagggacccaactcgcgcctgtaccagttcacaggcaacctgcgcctgcgggcgccgctgccgcccaccgtggtcgcagccatggcagcggcgcaggccatggcggcagcggccaaggcggcagccgccgccgaggccggtggcggggaaaaggaaaagctcgagcaagaggggccgggttggggccgtgcagcggccaagagcctgcttgcgaatggcatggaggcgcacgcggcgacccttaagtctatggcgtcgacaacagtcgccgcgtcggagcccagtcgatggaacttccgtgcgtcgcagcggcgggccagcacacgcgtggagccgccgcacgagtatgtggcgtcactggccgcgtcggcggtggtgctgcgcggctgcagcctgcgcaacaccacctgcatctacggcgtggtcatctacgcgggtgggtggcgcgcgcgcgcaagacggcggggcggctggaggcggcgccgcggcggcgggcgccgtggatgggagggctgcggtagcccgaaggggcggaggggccaatgcctcgccgtgcggtgctgggtgccctggttgccatggccggggccagcttgcgccctggccgagcctacccccgagtctttgagtggataatcctgtctgggcccacttattctatagctctttcgttcgcgccgcggttccaccaccgattcacgcacctcaccaagtctttcatgaacggctgccttcccgcccaccgcatttccggcacgcaggccacgacaccaagatattcatgaactccaccgaggcgccctccaagcgctcctacatcgagcgaaccgtggaccgcatcatcctcatgttcttctgcgtgctgctcatctggtgagcggggccgacggcgcgttcgggaccggcacatggactggcgggcggactggcggtgtgggctgtcagtaagcgggtgtgctcttccaggcgggcatgtgcacggtctgcagcaccagcggcatggcatgtccacagatggcatatccacacaacattctggccttgcgcctgactccaatgctgcccatacccctgccgcctgccacgcaaaggtgcctcatctccgccgtgtaccacgcctggtggaccaacacccacttccgccagcactggtacatgcgccccgacgccctggacgccgactccgatccggacaaccccgcacagaccggcgccgtcaacttctttgtggcgctactactctacagtgagatgcggcgctcttatacacgcacgcacaccccacagcagcactcaccgggtctacttgctagtctgcatcattcaaacctggtctggcgcttatcgcatgccggcatgcgtcatctgaccaacggagcattcagattctgtggggaatctactttcacgccgacccgctgccgttgcgcctcttgtgtcctgcaggctacttggtgcctgtgtcgctgtacgtgtccatcgagatggtcaaggtgttccaggctatggtgctcattgcgcaggtgggcgccgccgcagcagcagcagccgtggccgccgttgcccgctgctatcgcagctgcttgtgtgctttgcgccaggtctcagacctcagcaccccatgcgcacgcacgttctttcgcgccgcgttttccccaccaaaaagcagcgccgtcgtagcgataccgtaagttccaatgtaacggacctttgccaatgtgttcgtgccacaggaccgcgacatataccacgcggagacggacacgcccgcgctggcgcgcacgtccaaccttaacgaggagttgggcatggtggcggcggtgatgaccgacaagaccggcacgctgacacgcaacgtgatggagtttttcaaatgctccattgcgggcgtgccgtacggagcgggcattacggagattgagcgctccaacgcgctcaggtgtgtttgagcaggggcacggttgggtgggcgacgaggggtataaggatcaccaacaaaagctgcgtaggcgcgccgccgggctgaaatcggggcgtgtggggttcggaggcgggtgctgcggccgcaggacgaagcctggccgggattagctcggcgtggatggggcaatcttgtaccttgaaccttgccattttgcaatcgccactcactggcgaggctagtaagaggcctggacggccatgccgagactggtggttgcagcccagcccagttgcttattattcattctttcttctgccccaccctgcaggaagggccaggttctggacgaccgcgagcggcccgacgcggccaagttccgcgagcgcttcttcaacttctacgacgaccgcctgatgggcgaggcgtggtacagcgccaaggaccccgtcaccatcgaaatgttcttccgcctgctggccgtgtgccacaccgtcatccccgacggccccacggatgagaagagcatcaagtacgaggtgagcgccgagcaaccgcactggacgccgcacccaacgggcttcatggggcatgtggcgaactggcagggcggtctgttaggaggaatgactggggccaacatccactgctgagaaggaccccggtaccctcgccttctgccccgcccgcccgctttccaccacccaggccgagtcccccgacgaggctgcgctggtggtggctgccaaggcgtttggcttcttcttcttcaagcgcaccaacaccaccatcacggttcgggagcgcacgccgcgcggcaccacggacgtggagtatgaggtgctgaacatcctggagttcaactccacccgcaagcgcatgagcgtggtggtcaaggagaaggccaacgagaagatcatcatcttctgcaaggtgggcgggggcgtgacggtggaaacacgctgggaagctgatgaacaggatggggcaggggcggcagtggtggcggctcagtcggctgctgcaaatgggcaagaaagccacaacgggcatgacgttgtcgtgtatgactttcctagggttgtctcctcttgtaacatcgcgaacatgatctgcctaaactcggacgcagggtgcggacacggtcatctacgagcgcctggaccccaactacggccccaacgaggacgccaaacaggccacgacccgtgacatggaggactttggagcgtccggcctgcgcacgctgtgcctgtcgtacgccgaggtggaccgcgactggtacgacgcctgggccaaggagtgggacgcaggcaagaagtctctcgacgaccgcgagagcaagctggcggaagctgcggagaagatcgagcgcaacctgcggctgctgggctgcacggccatcgaggacaagctgcaggagggcgtgccggactgcatccggatgctggcgctggcgggcatccgcatctgggtgctcaccggcgacaagatggagacggccatcaacatcgggttcgcctgctcgctgctcacggaggagatgcaccaggtagggcgaggcgcggacacacggtagcgagggactgataggcccaattgtggagatgttgacgagccggagcaggtgtgtgtgcgtgggtgtgtggtcgtgtgccggcgtgcgcaagtgccagcgattgacactgatccctgcctggaccgggctcgcctcttcggctatccgcagcacacggtcacggcgtcctcggcgcgggtggaggagctggaaaaggcgggccggcggcaggaggcggaggcgctggcggcggagctggtggccaagcagctggacaaggtgagtggcagctggagaacaggatgtgcatgtgtgggagggagggaggcgttccaagacaagcggcagcgcaggttacgggcaccgcctcccgtggctcctgcttacgaaatattttgatggcaatacccctgtttacaaacagattgacttggagctcaggcaggctaccgaggcggcgaccggggcagccggcaaagctggtggcgccggcgcggggccgaagcagggcggcgctggaccgggcatcggcggcggcatgggcggcgatgccattgacgcggcgctaatcatcgacggaaaggcgctgagctacgcgctgtcaaaagacctggcgccgctgctgctgcgcgtgggcctgcgctgcaaggcggtggtgtgctgccgcgtgtcgccgctgcagaaggcgcaggtgacggggctggtgcgcagcaccggcagcatcacgctggcgatcggcgacggcgcgaacgacgtcagcatgatccagcgagcacacattggtgagtcaccaggaagattcaagacttgagcacttgaactgtttatgctaggtggcttatcagtgggaggcaggtggcagcaagctggccatggacgggactgagttaccggtattcccttttgccccgcaggtgtgggcatcagcggccaggagggcatgcaggcagtcatgtcggcggatttcgccattgcgcagttccgctacctggtgccgcttctgctggtgcacgggcaatacagctacaagcgcatcacgcgaatgatcaactttttcttctacaagaacatgctgtttgcaataacacttttcacctactcggcattcacaactttctccggctcctacatctacaacggtgaggattgctcgggacgcttcccttgcgcctgcgcctgcccgcagcccacatcgcaaccgtgttagctcacttcctggacacccgcttcccccacttccgcatccatccagatctcctgcatacgcacactcaccaactacgcaactggcacataactccaacacctctcgaacgcccctccttcatgccctccctcgccctgtccaccgcaacacacacacacatacggtacacacacgcagacacgtccatgacgttgttcaatgtggcgttcacgtccgccacgccgctgctggtgggcatgttcgaccggccgctgggcaagcgggccatgctgcggtacccgcagctgtaccgccaggtggggtgtgggtggccgggcggccgagtgggtgtgggtttgcgcatgcatgatgttgtgcacgcccaaccgcacacgccagctagtgtgcacaccgctggaatgaagaaactatggaggaggatgcccagaagcgcatagggcctacgcctgggccagggcggctagggcgacggtacacgccgccgtgccataccctgctacttgcccccaccttccttccgttgggctcaccgcgcagggcattgccaaccgcgacttcaacgccgccaccatcctgggctggatgttctcggcgctgctgcagtccggcatcatcctggtgctgtgcctggtgggatgccgcggcaccaccgcctccgcagaccacggcatcccctggagcatggccgaggtggggcagcgcgcgcgcgtgtgtgtgtgtgtgtgtgtgtgtgtgtgtgtgtgtgtgtgtgtgtgtgtgtgtgtgtgtgtgtgtgtgtgtgtgtgtgtgtgtgtgtgtgtgtgtgtgtgtgtgtgaatgtgtgtgtgtgtgtgttggtgtgaaagagcacgaggaaagcaagacgttgcgtgactgccggtctggacccaggtggaggtggcttggtggcccgaccgcagctgcggctgagaatgtagccttgcagcacgccggccttgcggtgccgcctgcagccgtccgaattctcacatgccgagttgggctgacgccgcacgtgctacatacctgagtgtgctgcctgtgtgccgccatgtgtgcgtgcctgtcttgcacgtgtgcgcaggtgggggtggtgatgttcacgtcgatcgtgctcaccatccacctgcacctcaccatggtggaggaggcctggacctgggtacaccacctggccatctggggcagcgtgggtgagtcgcgcatcagcatgaccccaaagtcccaaccctgggcctgggacttgccctggagcggcactgccgcgcgcttgtgccgcgcgcttgccatgcatcacgcgtaggccgaccctcgcgttgcttgcccacacccgcaccctgcaccacttgccccttaatgcacgcgctggcggtaaacccgtggatctcaatttccaaacgtcttccgccaacatgcacgaatgtcttccccccaacctgcgccgcgccccgccgcgccccgccgcgccccgccgcgccccgccgccccgcagcgctgtggtacctgtacctggtggccttcgcctacttccccgtgtcgtggagcctggagatgtggcacctgttcgagggcattgtggcgcccaacgcccagttctggctctacagcctgatcatacccgcggcggcgctgctgcccaacttcgccttccgcgccgtcagccggtgcgtgtgggaggaagcgtgggggctgctcagaggactggggttgggaggttggcacgcgggtgctgcgtttgtgcagtgcagagggttggctaaggacggctgtaggtcaatagagcgcggcggcttggggcgctgcacagctgtggctttacaatgcagcggcagggcggctgcgcgacttgggagcttgatgctgctgcaccaggggggatatccttgttgtcatcgttttgctacaactaacgtcttccgcgtttgcggcggttgcaattccgtttgcctatgcaggctgctgtggccaagcgacgaggacatcatccgtgagatgcagaaggtggagcgcgcagccaacagcgactcctcgcaccgcgccggcggcgcagctggggccgcagccggcgccgccagtgagcaccacgccctgcagaagcacaagggcggcggagggctgctcatggcagcgatgggcagcggcagcaaccgcgtagcgcccgagccgcccgcatcgccgctcggtggcggcgcgcgcggcggcggcggcgccggcgtcaagtcggcggcggcgattgccgtggctgagggcgggccagggaataagtcgttcgcggtcacggcggtcattgctgctggcggcgatggggctggcgcgggcggggctggtggtgggaagggcaagggcgggcggtggagcgcgactgggcaagatggcgttgaggagctggatggcgaggaggccgcagacgacgtcacggcggcgcctccacagccgccccctggcgccctgacgggcacccggagcagccgcgacggcaaccccaacggcttcagggtggtcggcaacaaggggcctggctcgacaatgcactcagcaagtggtaatggctcccgcgccgcaagtcgagcgggcccgtcaccctttgcagcggcgctggctccgccgcctccgggcgcaaccagcaacaccagcgggctagatgagctgacgctggtctccgccgacggcggcggcatcgacggtgccgacggcggcgccgatgggagggagtcgccgctgcttggctcctttgcaccatccccgacgcgcagcgtcgccggcccgagcgtggggcatatccccatcgccggccgcagccgaaccgcgggactgcccactgtgggcagctccacgagccttgtagggggagcgggtggggtgctggcaggcaacgggcaccactcgcagcgcttcgcccaccaggctcacctaccgcatgcggcgctggcgtcgtccatctcgacacccgtgcttggggaggacggcggccgcaacaacagcgggacgggccgcgccgctgcgggcgcgggcgcgggcgtcgggccggggtcaagcgcaacggcgtcgccgcgaacgcaggccgccgttgcgcgggggcaggcagggaccatgggcagcaggggcggcggcggcggcggcgagatgcagcctacggcttccatgtcgggcgggaggatggtggttggccaggcgtccggccagacgggcgacagcgccagcggcgtgcgggaggtgtctacattgtcccgggcatcgtcgtcatcggtgcagggatag

SEQ ID NO: 59 - DNA, 6611 bp, Chlamydomonas reinhardtii
atgccgaagggctgtccctccttccgtaagaggacgggcacggaggagacgaagcgtacagtgcacataaacgcgagtcaccatgagcacctggagctgctccaccagcactataagggcaatgccacttccaccaccaaatacaacgtctggaccttcctccctaaggcgctctttgagcagtacaggtgcgtgagctgcgcggggagggcgcgcttgccatgtgccagaaggtggcgctcgctcgacttaaaagagaaaaattctgctgcaggcgtgttgcaaacatctacttcactatcgtggcagcgctttcgctgacacctttctcgcctgtgcggtaaggtcttcgttggggcgggcgctcccaagcttcgatttccttgcctaaacccgcgcttttctgcagcgcgtggacgacatggacgcccctcatcatcgtgttgggcgtggctatggtcaaggaggctgccgaggactacaagcgctacaagcaggacaaggaaatcaacaaccgtgccgtggaggtgatggacccggccaccggccagtatgtcaccaagatgtggaaggacgtgcgggtgggggacctcgtcgtggtgacaaaagaccagcagttccccgcggacctgctgttcctcacctcggagacggaggaggggacgtgctacatcgaaaccatgaacctggacggcgagaccaacctcaaaatcaagaaggcccctgatgagacgaaggacctgaaccagatggacttcgcgtccttcaagaacgccaccattgagtgcgagggccccaacgcgcgcctgtaccagttcacaggcaacttgctgctggacgggaagaccctgcccatcagccccgctgccatcctgctgcgcggctgcaacctgcgcaacacggacaaggtggtgggcgccgtcatctacgcaggtcagggtggtgcttgggtcaccggataggaggtgttgggtggcaagaggtgtgcggcgttctgtagtacggcatcaacccggccgcatcaccacgggttcaaacaaggcacagcctccttggcaacaagatgcagccaccattactccccgcgcagactggcactgagctatttgatccacgcatgacttacaggccacgagactaaaatctttaagaacgcggcacccgcgccctcaaagcgcagccgcgtggagcgcatcgtggacaaaatcatcttcttcatgtttggcctgctgttctcgttctgcatcattggcgcggtgtacttctccatctggacggagaagaagtcgcccaaccactggtacgtgggctcagccaacgccacgggccagtacgcgcagtacgcccccggcaacccggctttcgtgggcttcgcctccttcatcacctcgttcatcctgtacggtaagcagacagcggttcgtcgtgggcaaaatgggttggggtgctcaggtccgaactggtgttgccagggcacggaggtgcggactgttgtgcaaatcagcttcagtgcaagagtgctgacgttgtgggattgaggcactgtaccagcagcgcggcgctgcagacttgagccagctgtgcggggctccggtggtggtatcaaactcggtcgcactcgcatgccgcaggctacctcatcccgatttcgctgtacgtgtcgatggagctggtgaagattgcgcagtccatgggctatatcaacctggaccgtgacatgtaccacgcggagacggacacgcccgcgctggcgcgcacgtccaacctgaacgaggagctgggcatggtgaacacaatcttgtcggataagaccggcacgctgacacgcaacgtgatggagtttttcaagtgctccattgcgggcgtgccgtacggggcgggcattacggagatcgaaaaggcgaatgcgctcaggtgtgtcaggggctggagcacggtcgggtgggcgacgagggaaataaggatattcaacaaaagatgcttttgagtggatgcagcgtgaccttagcaaggtggcggctggtagccaagcgcaggctcgtgaatcttgccatgctgtcgtaaacacttgtgagatggacagaagcggtcaggagtcacaggccaatcctggtgggagcaggcgttgggtgaaagccggtcgcatcgtgggcacttgaacgccttgccatgtgcccctcgcgctctgccctgcaggaagggccaggttctggacgaccgcgagcggcccgacgcggccaagttccgcgagcgcttcttcaacttctacgacgaccgcctgatgggcgaggcgtggtacagcgccaaggaccccgtcaccatcgagatgttcttccgcctgctggccgtgtgccacaccgtcatccccgacggccccacagatgagaagagcattaagtacgaggtgaggccgagcagccccactagacaccggacccaacgggcttcatggggcatgtggcgaactggcagggcggtctgttaggaggaatgactggggccaacatccactgctgagaaggaccccggtaccctcgccttctgccccgtgcgccctctttccaccacccaggccgagtcccccgacgaggctgcgctggtggtggctgccaaggcgtttggcttcttcttcttcaagcgcaccaacaccaccatcacggtgcgcgagcgcacgccgcgcggcaccgcggacgtggagtatgaggtgctgaacatcctggagttcaactccacccgcaagcgcatgagcgtagtggtcaaggagaaggccaatgacaagatcatcatcttctgcaaggtgggcgggggcgtgatgatggagacacgctgggaagctgaaggagaggaggggccaagggcggcagtggcggcggcttggtcggatgctgccggtgggcaagaaagcaacaacggcactacatgaacgtgcacatacttccatcctttggacgcccagggtgtcccctcttgtaacgtcgcacacgttttctgcctaaactcggacgcagggtgcggacacggtcatctacgagcgcctggaccccaactacgcgcctaacgaggagatgaagaccacaacctcacgggacatggagaactttggtgccgcaggcctgcgcacgctgtgcctgtcgtacgccgaggtggaccgcgactggtacaccaatgtgtggatgccggagtgggtcaacgccaagacgtcgctggaggaccgcgaaaacaaggtgggcgaggtcagcgagaagatcgagcgcaacctgcggctgctgggctgcacggccatcgaggacaagctgcaggagggcgtgccggactgcatccggatgctggcgctggcgggcatccgcatctgggtgctcaccggcgacaagatggagacggccatcaacatcgggttcgcctgctcgctgctcacggaggagatgcaccaggtagggcgaggcgcggacatacggtagcgggggactgataggcccgctttgtaatttgtgctgtgggccgcgtggcattgccaagcgtttgtggcttctgagagcatccgtgcccatcgtcctgcagttcaccatcagcgtgtatggcgtggaggagattgagaaggcggagaaggcgggcaacaaggagctggcggaacagctgagccacgcggcggtggccaactccatcaaaacggtgagtaccacaaaggggtccttcctggaagcactagaggcgctacgggatgaccttagcccacttttgcacgctgtcgtctgctgtgctttggcgtcaggcacattgtaaaactccatgcatgcaaacacagatcgaggagaccatgacctccaagtcggagggctcgcgcttcgccataatcatcgacggcaaggcgctgagctacgcgttgtccaaggacctggcggcgggcttcctcaagatcggcctgcgctgcaaggcagttgtgtgctgccgcgtgtcgccgctgcagaaggcgcaggtgaccaagctggtgcgtgaccacggcgacaccacgctggcgattggagacggcgccaacgatgtgggaatgattcagatggcgcacatcggtgagtgatgttgccatgttggcgattaaaagtgtgcttctggcgaggtgaggtaccgtctgtgggcttcatcgtagtagcgggcacgcctatgctgagtgctgaagctactgtgtgatctttgctattctcctcatgttgcggcaggtgtgggcatcagcggccaggagggcatgcaggcggtcatgtcggcggatttcgccatcgcgcagttccgcttcctggtgccgctgctgctggtgcacgggcgctacagctacaagcgcatcacgcgcatggtgctgttcttcttttataagaacatgctgttcggcgtgaccatcttcgtgttcaacgccttcaacgccttctccgggcagtttatctacaacgatttctacatgacgctgttcaacgtggtgttcacagctctgacgcccgtggtaatcggcatcttcgaccgcgacgtggacaaggccatggcgctcaaataccccggcctgtacatgcagggtgcgtgctgaagcagtgacgtacgggctgcttgcacgtctgcagcaccaactgcctgggcacggtccgctcatctcattcatccatagcactgattctcgccctgccttgccgtggttccgtcacaacccgctgcccctacaggccagcgcaacgagtacttcaacttcaaggccattgcgctgtggctgctgtcgtccatgtaccagtgctgcgtcatcatggtgttcgtgctgatcggctgcaactccaccgaggtggaccgcgacggcggcaacccctacaccatgtggcagacgggcgtgctcatgtactcgtgcgtggtcatcaccgtgcacttccaggtggtgcaggtcatcgagcagtggtcgtggccctaccacgttgccatctggctcagtcagagtgagttgcgtaaccctgcggcgagctgggcagaaccttgaccactacctcacacccggccaagcggcttcatgctgcggccaggtacagcactgagcgaacacactcaccactgaccaaccttgcacaccccgcacgtgcctggtgtgcacctgcagtcgtgtggtggctgtacctgctggcgtacggcgccttcccgctgtacttcagctccgacctgtacaacctgttcgtgggcatcgtggcgccgggcccgcagtactggctgtactgcctgctgatcccctgcgcctgccagctgcccgacttcttcgcgcgcatggtcaagaagtgagtgttggcgcggaccagttggctgggcgcacgggttccgctcgcggttgtcttggtcccacgatgagtgcctgcttgcgcgtgtgggcgagggctgcgcatgccgcctgcatgtctggatgcggcaagcctgcaacggctgtgcttgccactggtgacgctgcaggctggtgtcgccgttcgaccacaccatcgttgcggagatccagaaaaagctgcagcgcgccggccgcagcctggcggatgagaggggccaggagccgccgtccatccttgccggcatcttcagcggccaggccaacaagaaccgcggcttcgtgccgccctacgacccccgctccaagtgcgtgcctgaaactgggctatgccgagctgaccacgcccgatcttgtgtgcacgctccctttgcttgggcattctctctcgtccctaaacatcttccgggggcgtgcttgcgcaggttctacgggctggtcagctctggggcgcgcaactcgggccgtatcgacacgggcgtgcgcaacccggtgctgcaacacctggaccaggagctggcggacaacccctaccgctccggtcgcaagaaggggctgccggggatatcgccaaagtgcgtcggggatgggggatgggcacagaggtgcaaacgctgtagcattgtgtttgctgtctgggcgcagatcgcggcctcggactgtgtgtaaccttcgcatcgctgcttggttctgctgcaggggatcatctgccactgccgccgcggccagcgccgcgtcggccggcaacgtccagccagtggcggctgcagctgccaatggtgccgctgacgcagcggccgcagctgctgccgctgctgcggcggcgaccacggccacggcagccgcggtcgctggagcggctccccccgctgcgccgccgccagcagtaaggtccccggcggcgcgtgtgctgccgccggttatcccgccgggcggccaccccaacggccgcgcacccggccggctgccgcccatgggcacgccgccggtggggctcactggcgcggataccatgccctcgaacaacagcgatgcgcctgccgccagcagtgtgcccatgccgccaccgccggccgtgggcttggcgcccaacccacgctccaagaataagttgccgccgctcatccacggcggcgcctcgagcccggccctggcggccacggcagcggcggcgccgggtgcgattgccagccctggcgcacctgcactggccccgcccgccacggcgaacccgcaggagcgggagatcttggcgacatacacagacgctctgcagcgttaa

SEQ ID NO: 60 - DNA, 3841 bp, Chlamydomonas reinhardtii
atggcacgtagcacgtatgatgactttatcatcaaggagaaaattggaagcggcagctatggcgtggtgttcaaggtggtgcgcaaggtggacaagcacgtctacgccatgaaggaaattgacctccagggcatgtcccgtaaggtgcgtggcatgcggtgatcgttggagacgggcgggggcgccacatccttcatgccctcgcctacgcaggagcaagaggagtgcattcgcgagacgcgcgtgctgtcgtctctggactcggacttcatcatccggtactatgactcgtttcttgagaaggtgtgtcgacggcctttgcaagtgcgggctcggacggggccccaccgacttttgctgtcgcgcagggcaagctctacatcatcacggagtacgcagccaacggcaacttgcacgattacatcaaaaagcaaaagtcccggctgacggaggacctcatatggaagctgtatattcaggtaggcccgcccgcgtgctggatgctgctcgctactcgccctactgaactcccctcgcctttgtgtagatcctgctgggcctcaaccacatgcattcaaaaaagattctccatcgcgacattaagacgctcaacgtcttcctcgatgaggacctgaatgtcaagctgggcgacatgggtgtggcgaaggtgcgtcctgcgagcgttgcgggcctgtgacagctgctctggttgcctcaaacggtgtgagctcaaccacggggcttgcctgtgcagattctgagcacaaacacggtgttcgcgaagaccatcgtgggcacgccatactacctgtcgcccgagctgtgcgaggacaaaccatacaatgagaagtcggacgtgtgggcgttgggagtggtgctctacgagtgctgcacgcagcggcacccgtttgacgccgacaaccaggtgaggaggaaaggagtgccggggtgtaggggtggtgggcggtggtacgtggtgggcgtgccaaacgtgtgctgggaacacacacgccctcgccttcccttcccataaccgcggcacctcacctcaacggctttgcctatgcgtgccgtgtccacctactgcagggcgcgctgatcctcaaaatcctgcgtggcaagttcccgccggtgtcggggtactcgccagacatctgcgacctcatcaagcgctgcctcacacaggtgcgcgctgcctcctcaggagcatgatagggagcacttcccgcgtttcagttggttcagctaggtcagcagccattcctgcggacagcccagccgtgtcggtttctagggccgagtgctgtatgccctgaacccggtcgctcacacgcgatgcgcagaacgccaaccggcgacccaacacctacaagctgctgctgcttcctagcatccggcaaaagggcgaggagctgggcatctcgctgcccgaccaggccagcctggcgctcatggcggataagaacatggcgaacgcgggcgcggcgggcaaggtgcgtggccgggcaggaggagcaggccgggctgcaggcgggccggaggacgcgggtggagtggggagcataggcagacggacaagtggattccgcatggagtcccggctgggtggggggtctgcatgttgcggaagctagagggatgccgtcggggcgtggtgcgcgggtgtacaggaccggggctcctcccagctacgccccgactgactgtgctcctcccactgtttccggtacggacgtggcctggtgcggccgcgctgctctggacctggcgtggaccgtgcttgcgagcaggcggcacggcccaagacgccacaaggtgcggggcgcagtatgcgagcaggggaaaggcgacccggctacgtgggatgcctgtcaaaatgtggttaggaagcggctggatgcgctgtgaaggcaaggaggccagactcaactctggctatggggcccagtgggcatgggcgcggaagttcccaagcagcgcccgcaaagtggacgtgaccgatggcgccgggccaccggccgtgcctgcctgtgcgttcaggcgccggcggtggcgctgcggtggtgccggtcgagcatgcagtggccgtgcgggcggtgcgggaactgcctaagaaccccgcaaagtactttcagccacagggcggggtcattcgcgtcgtaggtgcgtcgtgaggtcgtggcacgtttgcgggcgtcagcggtcagccagtgcaagtgccgaggccacaccaacatggcgccggcatgggtcatcacctgaaatggtcaaagagcgcgtgctgggctccaagcagccgcggccttcaagccatgctgctgttgggccaatgctgacacgcctgcgccttgcttgccttgctgtcgcaggcgacatgaacgctccgccggaggtggcggggacatcggcgggcgacgacaaagcgtttgtgttcgggtcaacgatccgggcagacggcgcgggcgcgcggccggtggacgtgtcggtgtcggcggtggaggcgacgtcgggcgagggcgcggcgccgggtgcggcgcccgtgccggtgcaggcggcctgggcggtggacgacgcaaagcccaaagtcaaccgcccaccagcatggggcttggcgcagcagatgggtgagtgggtgcacgggctaaaccgtggctgctggggttgcgggccgtggggtgcgcgcggctgcggacccatggcagcacgttcggcgctaggttaagctggcgaaaggggaggggccctaggacagaaggagggagccgccggggacaacggcagcgcggcagcggcctcgtcgctgccaaggatgggagcgggcgcttgggtggtggtctgaccggaccggcctgctgttgctggcctgggctggcatgtgtcctagacgatgcgtgtggactgacggcgatgccgcacaatgccacggcgcctcattccggcctgcgttgctcggcggcatgtctcggtcggtcattgccggcccccctagtcccgaatcgacctccctagacccgacccggccctcctcccgcctcctgctgagagctgagctgtgcctcctgcccacccacctccccctgcagaggagctggcggtggatgacggggaggacgaggacgagggcaagaacccctacctgggtgtgggcggcgacgacgacgaggacgatgacggagagggcgatgacgacgacgactacgacgacaacggggagtacggcgacgagccgggcgagggcgagccgggctggtccgccgaccccacgcgcatcgcgcacatgaagagcgccatgatgatccagcgcgcggcgtgcctggacctggtgggcgagaaggccttcaacgagctgtgagtggaggggcggcagggggaggggagcgcggggctggggctggggcaggggaaaggggaggcgccggggcaggggcaggggctggggctggggaggggagcgcggggccagggcaagatgaaggcagcggttttgcattgccaaatcgggtttgcgtgtgcattgtgccatggtactgccatgtgcgcacggcgatcctttgggagggagcacgggccgcaggtggtccctcctacctggccgcctccgctggcccagccccatgtctggatcggacgcgaacgtcacccgccggcgcctgaccgcctcttccatcctggctgccatcctggctgcaggtatgcgctgctgaagagcaaccaggtggatgaggcgtccatgacggacctgtcgcgcctggtgttcaagatcatcccgtacgacaagtccgaggtcatccagatgatgtacaagctgctgtacctggagtcgcagctggaggggcagtga

SEQ ID NO: 61 - DNA, 2813 bp, Chlamydomonas reinhardtii
atgctgctcgcggcgcaatcaatgccaaagtgcatatgggataacgttaccggcgcgttcggccagtgtgtcgcgaacgactacacgctgctgtccatgagcggaaaaccaccgactgaatccgccaggttggtgccgcgcggtcacacacaggctcaggctcccgcgctagactgcgccaggcccttgaatccactgcgtcatctacagctgctgggcccttacagcgccaacggaagctgttcccgcttctttgtctcccgatttcggttgcacgcacacgcggcacacacttttacacaggctgttggcgtacgcccagcaccgcgcagtgctgtgcaagcggctcacgagcgaggcggcgtgcctcctagccatggacctggggtgaggcgccgctgctaaaagggaggggatgggcagaacccctgtcttcattccgtgcgccacggcgctgccggttcctaggcaccagctgtagcagtacctagccggcgttcctgctacaccaccaaggctccgtgcttgcgttccttcacacatgtgtgttatcagcacgcctctgccctgtggctcacaccacaagcctacctttaccacgcgttcggttcacaccccatggctcatgactgcaggtgtggctgggaccggctggccggcctatgcttcgcctcggacgcggcgctgctcagacccgaggtatgttgttgtgtgtgattacaaggtggtgcattcctgtccttgtagacaccgcgacgttattggttgcgcgcacgtgtcatggcagtagggggcagctgggtggaagcatgacgaagagttaagagggtgcgaatgctttgcaccttcggggtcagctgctggttgaaccgttgaaggggacagatggcagagtggagggcggagggcagaggctgcgccacaattgtctgaagctgtgatctgggcggaatcggagcacaacgaaaaccgggacggttctcggcctgactcactgaaaggccgccgtttcacgtgctgtggcttggtcacgtgcccgtggctcttcaggtgctgcaagggcggctcttctgcggcggctccctactcgaccaggcgacccgctgcctgctactgccggggcccagcaacggcagcagtggcagtagcagcggtggcgggggcggcagtagcggcaccggctcggtcgcggcaaccagctgtagcgccgctcacaccgcttgcacctacctcagcccaacgcagctggcggcggcgttggcggcaccggcggcggcgacggcggctccatacctgcggctggcggcgctcgccaatttcaacgactggccgcctccaggtgtgggggcgggctcaagagggattggggtttcaaaagcttgggatcacgacggcttgggatggggcgccatgtgagctggaggaggagcaccaggcgcagcagaggcgcgtatagataggggttatcaggggtgtttgctggcgatgcgtgttggtgtgtgtgtctggaccagtaggagatgaggggatgacccgtccgtgtccctaagggcgccggctccagatctccaatgctcaaaggcagcggcatgcagtataccgccacgcatgtcccacgctgaccaaccgcctgctgcttgctcacgacgtcgcccccgctttgtgccatcgtctgtttgatgcgatgtgcatgcagagggcagtggcgcatgtgtggccaaatggttgacgcaacccgacacactggcagctctggcgcgcagcgtctccgccaacccaacggtgtgtgtgtgggggggtggttttcgaggccccttgctgttatggtcatggcagctgtatgacattcctaccgtgcccctgacgcaccacaatacacagtgatctgtacactccatatgatccgtacattccatgcggggtgctgcaggtctggttgctgcagccagacctggtgggctcgggctgtagcagcacgctggcaggagcaaacatcagcgcagcacccgagatggcgcgggtgacggcggcagtagcagcggcggcgtccgcgtgtcaggcagcgggcgtcgccggcggcgcggacggctgctcggcggcggaggatggctgcgactgggctgatagcggaggggcaaccggcggcagcagcacaagtagcggtgatagcagtagcggcggcgggacgtgcagcgtgggcacggcggcgcttctggatgcgttgtttgatccacaagacgtgagtggctggcagccacagacacatgtttgtgctttctgacacaatgatgacgccatccggcacggaatggcattgcacctgctcgtgctgcgctcacgtgcggttattgctgagacctgcccctgacctcgcccccgtcccaaccattgtcaacactcctgcccttacttcctcaagtgcttgccaacagccaccgcctgcgccccagaatgaacgacccatccacccgcccacccgctaattttgcttggtttggtttattgtgggctggtatctacaacccacccacccgcccaaacccgtacaggcctgggtgagggcgcttgatggcacgaccgccctctgctccgcccagggcactaccgccagctgcgccgccgccggatccattatcgtggatccagcccggctcgacacgtggcgggacgtgctggtagacggcggcggagattgggtggacggtggcagcggcggcgcaggcggcctggcggcggggcaggcgctgccgctgctgcgctggatgctggtcgtgtgggtggtggtgtttgccggcatggccgccgtgtattaa

SEQ ID NO: 62 - DNA, 1849 bp, Chlamydomonas reinhardtii
atggtcgctggagggttgcagcccccaagcattgacgaggaggaggctgcggcgcgcgctgtgggccagggcgttatttttatcctcgatgatgctcagttagaggttgcgcaagtcggcaaggtgcgtaaacaagtcggtgaccgaaacgtcggcggctgagtcccgacaggctttcgcccacgcagacctaccagctgctgaactgtgatgaccacgcgacatatcttcgaaagcacaaaaaggacccggcgctgtaccgcccagacatttgccaccaggtgcgagccccggcggggtgttgacggggggcgtgccgtcgtagcacgtcggcaaggcgcctggcgctctcgagcggcgttattctaccgcagccatagcggttgcatgccaagctattgaaaggcaatgccgaatgtgtacacgacacgttgggtggcaccgtggcgggatgtggcactggctggggttctggcccgcggcactcagctgctgccgcatcggtccttgcgcaggcgcttctaaacgtgctcgacagcccgctcaacaaggccgggaaaatcaaggtgggatcgtgcggacgtggggagtgcggtgtcgactaaagctgctgtggagttggctggggcaacggctgcccaaggcccagctacgttatgttggcggtcggggacaccagctacagcggtgttgcgacagctggcacgttgcggttgaggcaggaggcgacgccacagcggttgcagtcgctcagggcggggaggcttggcccggggcggtcaggacgcggatggcggggagacagtggtgcaggagacaggacgcgggaggggatgatatgggaggcagtgatacggtaggagcacgcgtctgtggtcccctgccgagccacacggccatgcggccgcagctgcaccaacacatcctccccccggcacacccgcccgcacctgcacctgcgactgccaccgcaggctgtgtacgtgcgcacgcacaagaacgtgctgttctccatcaaccccaagacgcgcatcccgcgcaccatcaagcgcttctccggcctcatggtgcagctgctgcagaagctgtccatccgcgccaccaacggccctgacaagctgatgaaggtgcggagtggaggagggaggggggcagggggttccaagagggggcgtgagcggcggaagtggcgggaggcagggacgagggggcacagggtgggagcatgccgaaccaaaagcgccttgtatccccatctctagggtgttgtcagctgggcatacactgcaaagtgatattgatcccaacctacgtcactgcaggtgattaaaggcccggtgactaagcaccttccgctcaactgcaagcgcgtgggcttttcattcgccgcagataagcacgtggccatccatgtgagtcgtgtctacggctgtacggctgtggtcggggcctgtacgggacagttggaccaggatggctgggcgggttgcagaggtgtatggcttggtgtgcggccgcggcgcgggcgcagtgcctggtgctgcctgtgctctcctctgcatacccgcacacgcttcatttccaacccgacgcacgcaacacattcatccttatcacatcctcccgtatccacttccgcgcctcctcctcgtgttcacccttgcaggagtacgtggcggggctggaggacagcgggcccattgtgttcgtggtgggcgccttcgcgcacggcaagatcgaggcgccctgggtggatgaggagctaaacatcagcgagtacccgctgtcggcggcctactgcctggcgcgcatcacgcaggcgttcgagatgaagtggaagatcgtgtaa

SEQ ID NO: 63 - DNA, 3311 bp, Chlamydomonas reinhardtii
atggcggaccctggggcccaacctgtcccagctccccagtctgcggaagagccggtcaccggaggccttcaagagtccgtggaagtcacagcgtcagggaaattagactcatacaaccgcgagtacaaccaattcctggtgcgcccggagcctgggccccggtctgcagtcgggaaactttgtagcacgatggtcccgttcccgacccgttcccaccagttctacgctgcggcttgcaggtttgcggcagcctctttgagtgccccgctaagtacctgcccatcaagcccatcggcaagggggcgtatggcgtcgtctggtgagccagctgggggttggacggtcggcgggggcgtgtccttgctgctgcggctgctaccctcctggacccgttgttcttccgcaccaaaccttcatctcacgcacggacctgccaccccctgcattccataccgtccctacctccactacatccaaacacatcccactaccgacaactcccacacagctccgccaagaacctggacaaccaggagaaggtggccatcaagaagatcgcaaacgcctttgacaacgtcatcgacgccaaacgcaccctgcgcgagatcaagttgttgcgccacctgcagcacgagaacattgtgcagatcaaagacatcatcccgcccaccaaccgcgatgccttcaaggacctctacgtggtgtatgagctgatggacaccgacctgcaccagatcatccgctcgccacaggcgctgtccaacgaccacagccagtacttcctgtaccaggtgcggacgcggtggcggtgtatggcggcgcggtggtagtggtgtttgcgatggtgcggacgtggtgggtgtggcagtgcgcggttgaggaagcggagctgggggcatcgcgtgggttaggggcgggaaaagagttgggtgagggagtggtggggtctagccgaggtggttctcataggccgtggtcaatgcattgtgcatcggaaccctcttctgagctcaggttccaagcttactcaccgcgctgcctcgtttgcctgccctgatctccgcctaacccatgcctcctgttctcccaccccacagctgttgagagggctcaaatacatccacagcgccaacatcctgcacagagatttgaagcccagcaacctgctcgtgaacgccaactgcgacctcaaaatctgcgacttcggccttgcacggaccaggtgcgtgcctgcagcatgccttcgcgcctgaatgccggcctgtcccacaaagatcatgggatacacggcactggcacccaacagctccgtacgccccctctgtgtccaacccattccactccacgtcacccaagcatgcatcccatcaagcacccgtccaccgaccccgcgcaccgcacgcccccaaacgcccccccgcagcaccagcaacgagaaggagttcatgacggagtacgtggtgacgcgctggtaccgcgcccccgagctgctgctgagctgcagcggctacaccactgccatcgacgtgtggtgagcaggaggggggccggggcgctgcgcgtggactgagtgagagcatcgggccagacggggctgcgcggctccttcgcctgcaacctcaacacagtacaaacgcgtctcccgtgcgctctcttagactcttacacacgcgacacacacgcaacacgcacacaggtccgtgggctgcatcttcgcggagctgctgggccgcaagccgctgttccccggcaaggactacgtgcaccagctgtccctcatcaccaaggtggggacacggcaaggggggggggacccgtccatgcaacacgggggtggggtgttgaggcgtggggccgccttgccgactgccatgtgtgtagcaccgtgcgcatatgcatgtgcctgcgcagcagggcgtgcgcagcaagacgtgcggggctgtcactgcgtggcacaggccgcgcgcacacacctgccccgctcaccactgcccgcggtgggcacagcgcaccggcgcctactcacctgagaagcagtaggacagttgcgagccccatctccgccagattgcggacacccatctccagctacttgtaacccccccgagtatctcttcacgcacaggtgatcggctcccccagcgaggaggagcttggcttcatcaccagcgagaaggccaagcgctacatccgctcgctgccgcgatccgagcgagtggacttcgggcagctgtggccgcacgtcaccaagacggtaagagggcggagggcggaaggaaaggtgggaaaagtggggggctaactttgaaccaatcctgtaaggaaacagtcgcgctgcaaggagaaacaaggtggggggcgaggcgggttgcacgaacgctgctggccaacaggcgagacccagcaacggcccgggcgctgatgcagcggctggcgccttgcgggcttgggcgcggccctcggtactccggtacttgcatccaacccgcacgcacccacggctcaacaatacaacgaatcgcaggcgctggacctgattgacaagatgctggtgttcgaccccaccaagcgcatcaccgtggagcaggcgctggagcacccctacctggcctcgctgcacgacgtgtccgacgagcccgtgtgccccacacccttcaccttcgacttcgacagcgagcacctcacgccggtgcgccggtcacgggcgggcgcgagggctgcgggcggagcctggggagacaggagagcgcggagggctgtatttaaaacggaactgaagcccgtccagacggaggactgagtgtgtgtgtgtgtgtgtgtggtgtggacaatgtagcgacctggtgtcagtggtgtgacgagtgcggacacgccggactgaccccggttgcccttgtcatgtcttccctgttgcgccgcaggacgtggtgcgggaggtcatactgcaggtgaggggcgcagaggcgcacggccgtgtcaaattgtttgtttgccgtatcatattggttgtttgccgtgtgtgtgcgcgcgtgtgtgtgtgtgtgtgtgtgtgtgtgtgtgtgtgtgtgtgtgtgtgtgtgtgtgtgtgtgcgtgtgtttgttgcgtgcgcatgcatgctcatgcgcaaacgcgcatgcgacagacggtggctgtggtaacgcccaggcgctgctacggcagcactcgctgagatactttctaccaccgtcagtcctattgtttcgtgctcgtgcgctcactctctgtacacgctgattttcgcgacacgtacttgtgcaaaccgcaggacatggccgagctgcacacctga

SEQ ID NO: 64 - DNA, 4354 bp, Chlamydomonas reinhardtii
atgctgcagagcctgctgatcgtgctgctggggtgggcgcgcgaggagcacgtgcccctgcgggcgggtgcgctggcggctgcagaggctgcgctggcgctgccggacatgggcatgcccagcatacccggccgggccatctttgctttcctcaaggcagtggaggtgccggtgctggtgctgtgcggtgggtatgcgtggcgcggcgtcgtacatgcatacggagatctatggctggggcattcaacatttgtcctggtgcatttcgtttgcgcgggtccagtcttggtgcgttttgtttggccaattgtgctgattttgttgcagtagcgcggggcaggagtaaagccgtgcacataatacataacaaagacacggcatagagtccctgtctgtgtatgtggcagggaatgggtttggcccgttttggtcaagtaaggcacgatccaaacgaaccacctccccagaccggcgtcatacagcatacccttacttgtgggtttggggggcactatccaagtgggttctgctgctagctctttgactccgacagcttgcttgcatcaccaactgctgtagtcccgactgcggacgtgctactccgctccctagctcctgatgctgctgacgtcagcctccccgcccatctattcatccctgctgccacacgcacacgcgcacgcacacgtacgcagacgagatgcagcggctgttcctgccgctcatcggcggcgccgagccggacgctgccggggccgcgtacatgcgcgacgtgttcatgaagcagctgctgttggacggcccccacaccatgctgtggtgcctcacgggatcatccatggcgcacacctgcatcagcatcgcgcgcatgccccccaacggctacccgctcatcaccatggcctgcgccatccacctgccagcgacctacagcgccgcgcacgtaagcttcgcgtggcagcagctgcagcagaacagcggtcctgatgtggagctggaccgccagctgctggagctctgcccgcagtcaatcccgctcctgacgttcttggtgcacacatggttgtacaaccgcggccgcagcgacgtgcacaccttcgtgcgcgacttcatgcggttcaagctcatggagcaggtgtgtatgtattgcatgaatggaagcacagcggcacatgttgttgttgttgttgagcgggcgtttggtcgcaaaggcgtttatttgctgcaccaaaccctcaggcgtcctggatgctggatgctggccctcttactcatacattgcccgacatccacacatccacccatccgtttctcttcggattgtctacctcaggcacgcagggagtggacgcctggcctggaggccgtgccggcgtcgcagcggctcacgatcctggacctgtcgtttccggccgtgggggcgcgcatcgacacagggctgcaccccggcttgaagtactacctgacgccgcacctggagaagagggcggacggccactacttccttcgcgactcgcaccagcgtcagatcgtgcgggtgaggcagcagcagggcgtgtgattgtcgccgtacgtgcgtgtgtgcgtgcgtgcccaagtaagccaagcttgtctcctcatcagcacttctcacgcaccacacctcgctcacgcaaccgtctacccatcatcaagcgcttgcatgcaaacgctcagcgctggggccacctcaatgattatgactgcaggcttacttgcatcctcctgcgtgcccccctgagtttattcctctgcttgagtgccccccgggcgtccccttttgaaggtgcgcgccacgccacgccacgccctcgcccgccccccacctgcgcttgctcacgtgcagttcctgatcaacgaagaaggcgcgctgcggagcggattgggcgagctggcgttcagcgcgaccctgacgcagctggatggagggtggaacctgtttcacctgggggaggccgcggactacctgctcggtcccggcgcatgccgcaggtggcagaacggggagccgccggctgagacggacgcgttcgaggacaagttacaggttagatagcagatgctagcgtacttagatgggctacagggcttgagctcagaagttagtagggtttgggggggagatagaaagcgctggtaagcgcagatgaaatctgcatgggctgaaggaactggtgacgctctttcgccgccgtgcattggggcgccccgtgttgcgtgccgctcgattgtgatgtgtgtataaaattcagtttgcctgatgcgatgtctaactatctaggttgacattactcatgctactcatcgcaggccattgccgacgacgtcgccgtgaagctgtgcgcggcaggagcggcggcggcaggaggcgatcagcagccgcagcagcaacagcagcagcagcagcagcagcagcagcagcaccaggagcaaacgcagcagcagcagcagcagcagccgggcagcggcggcggcggcgcggcgctgggcccccagccgggcccccagccgcaggagctgtgggagcggcagtcctggttccaggaggcgctgaactcggagtggaacagccgtgatcgcgaggcgtacatggaggaggaggacaacaagcaggcgcggcgcacgcacctggccatgctggtcttctacctgcggtgcgtggttgtgggtgggtgggtgggtgggtgggttaaaaggcgagtgggtgggggatgcaactgaagctcagttcctggatgggtgggttgcagtgggtccccttgctgctgtcgtccaggagatggggcgcatttgggaggatgagcacatgcgcgtaacgtgccgggacggacgcggaggcatgtgcttcatttgcaggcagcggcggggccacgccgtgacgggcgctgctatgggttcgtgctgtgggtgtgcatgcgctggcaaggctgtgcgtctcatgtctctgcgtcccatgtctcgctcccctgacctaccatcagtggtgtaccgaagcctgagcctgaggcaccgagcctgaggctgaggcgcgttggtgtatgcctagacgtctgacctggacactgctgacccgggcgcactgccacgactgctgccgtatgtacgtgcgtccgcacgcctgcaggctgagtcgcaacgtgcttggccgtacgaagccttgggatcgggagactggctccaagctgctggatgtgggggtggttgaggcgctgcccggcgtgctgggccagtccctctttgccttcaacgaggcaatggtgggggcgctgcggctgctgccgcgccccaccgtgcaagccgccgctgcggcgtttgcggcggagctgtcaggcggcgtttgcggcggcagcgttgatgagggctcgggcgaggacgacagcagcagcggcggtggcctgagcagcggcagcggcggcgccggcagcaccagcggcggcggagggcgggggcgcggcgcaggggcgatgcctatccaatgcgcgccttcgcgcccggcgggaccagcggcggcggcaggatgtggtcagcgcccgccgctggtgtacgccaccggcggcagtcgcggggggtggggcaagagaaaaccgcgggcacctacactcgtgccgcgcctgcgtgcacggcttccgctctttgcaccaccagccgcagcagcagccgcagcagcgatggggccacggctacctcgctggtgattcgggcgccagtgtgtgtcggccgctgccgctgctgacataaccgaccgtgaccggctgtgcgccgcggtcagtggctaactgcgcggcccagtggcccagtggcccagtggcccagtcaaggctagggagtggtagtcagcttctggatggctccgagtgcatcggtggcgtgacgtgcgcggcgtgcgtgcctcagtgaaagcacgtgcggcagctgccgcacgcccacgcgtcgtgcgtgtgcaggcgggccgacctgctgcgtaggatgcatcgattggtgtgcggtacgtaatgggttgtggtaggcgtgtgccatgctgcgaacgttctgcagcctctctgtcaatatcaaatggatacatcgacatcgatacaaggtctttccttcacctccggttctgggcgccgcccaaccgccgcgaagctacctcaatgcactcgcacagcccccctgccagtgcgcccccgcgcagtgctctcacccataccatacctggctgagaacgcttgtcctcaactgccttctctttttgggtgtgcgcttccacaaagtaaaagactctcgggtcgtcctgctcatcaggacggccatccgcggccccccctcaaggcccaccacacgccacgtgtgttag

SEQ ID NO: 65 - DNA, 1519 bp, Chlamydomonas reinhardtii
atgctgcttttaggactcgttctggccctcgctggccatgtagcggctgcgccttcaagcgccatgatgggcactggccacaccgtgggctttggcgagctcaaggtgggagggaggcagagcactgttgcacgagcctctgtgctcgcgcggcatccattttagcggcgaacgcacactaaatgaatgtaggaagaatggcgtggtgaggttgtccacctgtcgtggtcgccgcgagccttcctgctgaagaatttcctttcggatgaggagtgcgactacatcgtcgagaaggtgcggccagcgcagcgcaagtgcggtgtcaagggctctattgctcttagaattatttgtcacacagcctgcagtgtttcctcgtgaaagcgaaactagtctcgcggaattcagcgggcgtgtgactgcatccccggtcgcccacggattcacaggctcgcccgaagatggtcaagtcttctgtggttgataacgagtcgggcaagagtgtggacagcgagatccgcaccagcaccggcacctggtttgctaagggcgaggactctgtcatctccaaaatagagaagcgcgtggcgcaggtgacgatgattcccctggagaaccatgaggggctgcaggttctgcactaccatgacggtcagaagtatgagccacactatgactacttccacgaccccgtcaacgccggccccgagcacggcggccagcgcgtggtcacgatgctcatgtacctgtgagtacgaggattaacagaggcgcatgcgagagggcaggggccgccgatctggagggctgggaactttgggtgcgagacccatggttcaatgacgttctgcaaggcggagctgggcgccgaggtgtgcgcggcacgacccgtgcgcacacctcaacccagccttttatgcatgcatcaccagcaactcgcacgggcgctctcccttcacttacgcaggaccacggtggaggagggcggcgagacggtgctgcccaacgcggagcagaaggtgaccggcgacggctggtcggagtgcgccaagcgcggactggccgtgaagcccatcaagggcgatgcgctcatgttctactcgctgaagccggacggcagcaatgaccccgccagcctgcacggcagctgccccacgcttaagggtgacaagtggagcgccaccaagtggatccacgtggcccccatcgggtgagcgcgtgcccatacatggggttgggtgggggtggggccagcaagcgccgatgccgatataatcgaggctcagaacctgggttcggttgcaggttgggtttagttcgcctagcgatggggctgggtacctagtaggtcatgtgcactgtgggccgggccgtacgccataacgtagcgcgggcccaagctgggcagtcggcatcaagctcgcatcaggcagcggactctgttgctactgtccctgtccggcctcgccattactgcacgccttgcctcggtgtactgccgtgcagagggcgtcattga

SEQ ID NO: 66 - DNA, 3214 bp, Chlamydomonas reinhardtii
atgggcgcgaaccagagcactgaggaggtgctggacgccgtgaaccaggcggacgtcgataagcttgcgccgacgcctggccctagcaaggtgagttctgggctggcgtagttgcaacttgcttgagactgcttgccgtttgccagtagggcataaacgattgcctgtggggccttcacccagcctttcccgtgctgacgcccgctggtcttcgttcgcaggagggaggcgccaccaagctctacaagtacatcgtcacacccagcggcgagggcaactgggagctggcgagcgcaaacgccaagccacgtttctatgacgcgctggaagactcgaacgccagcggcaagaaggatttcttcctggagattgagcagggcgacgtcgacgtgcacgtagatgcggagctcaactacgttcttgacgtgaagcagcgccgcatcacctttcacgccaacggcaccatctacgcgctgcgcttcccgcacgacacggcctgccgcgccttcggcgagcagctcaacgacgcgctgttctacaaccagtacggagtggagaacgacgacgacagccgcgccaagctgtttgaggacaacgccggcacactgttcagcaagaacacggatcgcatgtttgagcccatggagacggacgacgcgggcgacgaggcgggcgcggaggcggccacgccggagacgatgacggagcgtcgcgccaaagacacggagaaggatgaggacgccatcaacggcatcatcatgggcgcaggtgcgtgcgtggggggtgccttaggcggatgcatgtggcaggtggagcaggtgtggttgggcccctcataaaggccttcggatgcggggtacggatgcacgacggcgatgtggtggctctgacaagagttctcatgggttggttgggggttcttcgtaagcccggaacgattgcgtggttgggcctgggtgggggagaacgacgatgatgatgtggtggatgctgttggctctgctgaggccagttaccatatacttacgtctatcctgccatccttgcgcccctgtcctacctacaggcgagaacaatttcctcatgcggggccgccgctttgacgtgcttcgcaacctggagggcggcggcgtggaggacaagggcgtcagcttcagcctcacgcctctggccggcggcgccgccacgccctcgctcagcacgcgcaagacccgcggcacggcggcggcggcagaggccgacgcgctcggggcgggcttcacgccctccaaggtgcgtgcagggccaggggtgcgtgcagatgatgttgttgggccgtgattgctttggtgctgtcttgacccggctctctgtcggtatctccttgccacgccacgtgttcttagcttagtcctgagccctttcctgcccttcctctccctcccaacccccctgtccccgccactaaccccgcccgcccctggctgcaggtgctcctgacgcacggcgagcggcgcatgaacctgctgacgcccgacaaccggcatgtgctccaccacgccgacattgaggcgggcaagatcgtgagcacctttgctttccagaaggacaccgtggacatccccattgtggagatcgcgtcggactacaaggccgcgcagatggaggagcactcgcagttcctgggactggaccagaaccgcctgtgcaggtgggcgctcagggctgggtggactgggagggtttggaggcttgggggaaggtttgagttgcgggttggggaggagaggttggcaaggggattgtatgcccgagcccacacgactaagtccaatcacttgtcagatggggagaggtgtggatggaggcggcgtgtagaagaatgggttctggtagtggagggtgtgcccgcgcagtaagcgcgagtgaagtgggtctggtaggttcgcttcaacactttgcatggccccataccgcccttgctgacatccagatccccttccccctgctcttgcgcgcctgcaggtgggacatccgcgaccggcgcggtgtggtgcaggagatgcccactgcgctggactacgtgggcggcaaagactacagccgcggcaccaacttcacgtgcatggccaccagcggcgacggcttcgtggcggtgggcgccaaggacggccgcatccgcctctacaacagcaagacgctcacgcaggcacgtaccgtatgcgagagagtatggctgggagtggtgcgttccgactccaaatcaacccggacacccagacaaagtacgggaacgcgcccagccacgaaaacaattgcaagcttccatactgtgttcccagtcatcagcgccccacacaatgtaccggtacccgcgtccaagtgcgccaccccatgcagtgccttcgccttacctccctgccccctccccctccggtctcatcctccgcaggccaagacctccattcccggcctgggcgcgcccatcaccgccgtggacgtcacgtacgacggcaagtgggtgctggccaccaccgaccactacctgatgctggtcaagaccacctacgtggacgacaagggccgcaactccaacggcttcgagagccgcatgggcggccgcggcgcggtgccgcggctgctgcggctcaagcccgaggacggcctccgcacgaaggtgagcggccggccggggtagaccgggagcatgggggagatgggcagcaacgggctggggagggaggtactgcacatacagggcgtgggagggcgaaaccgcgaatgcgacagggggacacagccgagggcgtgatgcaagcgcattccagcacctccttacgcagccgccgactccgtacgttgctgcacacctgttcttattcctgcctgacccagccttccctctttctcgcaccctgctgctccctgcctgccgccacagggcgccaagttcagcaagggcaagttcacctggatcacggagggcggccagtcggagcgctgggtggtggccagctgcggccgcttcagcgtcacttggaacttcgccaagatccggacctccaccaccgagtccattggctacggcggcctgcccaccagcatggactacgtgctgcgctccaaagaggaggaggtggtggacgtggcgttcgtgcaccagaagtacatgcgcgacgtggagcaggcggccatggtggtggccacgccgcacagcctgttcaatctggcgtaa

SEQ ID NO: 67 - DNA, 2524 bp, Chlamydomonas reinhardtii
atgagcatcatttacgcactcacgctggccctcaacggcgcgggtgagtcgttcgacctttttgggaagttagactcgaaaccgtcgagcttgtcgggggaccgcaggcgtcgctagttgcgcaccgggtggccatacaagcaacacgtgatagtagttaagagcaaaaaaggttgcagggcgggctgccgcactggtatcgacacagtattgtagaaccgccccgcacgcgccctccccccccccccacccccacccccccacacacccctccaccacgtgccttactcgccttccctccccgtcaggccccaagacgtccacgcactcggagctgctggcagccattgccggcggcgccgagaacgccgccaacttgggtgagggcgacctgaactcggagctgggccgcaccatgacgctgctgaacggagccggcgccggcgcggccgagggctccgcctcccgcatggtgctcgccaacagcgtgtggacgcaccgcggcaccacgctgcgtaaggagtacgtggacgccatgcagtcgctgttcgacgccactgcgcgcgaggcggtgaacggcgccaaggacgtgaacgcctgggtggagggcgtgaccaagggcatgatcaaggacctggtacaaaccgaccagtgagtacggcaccgtacggcagtgcgggcattggagggtggtgtgggcacgggcgtgctgaatgcggggcggggttccaggcatgactcgcatgaggaaggggggaggctcgtgccgatattgtgctgtgcgcaaatctgcaccccgacacggctgctatcaactgctgctgccacatctgccacccaatctgccaaaacaccgtgccaacacgccttctgctccaatacctctgacatctgccaaccaacctgctacgcaggtgggacgccatcctggccaacgccatttacttcaaggggttctggacgcacgccttcaagaaggagtgagttgggggagcatgaggctgttgcagcaggggctcttgtccaggtccatcaccggcaggcgtgcttgttcggtacccgctactcatcggtgcggctggcgggtcggaatgcacaaagtctccgcttattgacaacacgccctgtaggcctgtactgcagtgaagaagcccagcccgcgtcccaaaccgtgcctcaactgcccctcgaaccccgctcccccacccccaaccccagggacacctttcctggcgagttcaccacgggcgccaaggccaccaaggaggttcccttcatgtgcaagaacttcgaggcgcaggaccgcattaccgccgtgcgcaaggtgggcagtcgtgacagggcgtttgcgggagaaaaagtttgcgtgtcaaggggcctgggcgcggcccacagaacgctgcagccactgctgaggggatgacgaactaccctggcttgctatggacttctgttgcactattccggcatgtaaatctgctgacctgtccgccggcctgcctcgcaggagggtctgtacgacgcagtggcgctgccgtacaagggcgacgccttcagcgccatcgcgctgctgccggcggtgggcgtggccatggaggcggcgctcaaggactggggctcggggccgcaggtgggtgtggcgggaccgtgcagggtgggcgagtgagcaagggggcgggttgggaggggtgggatggaatgggctgaggggtaccaatttggtttgaagcggtatctgttgagaggacagaacctgagctacagcgccgggcagcgaggggtcatttacgcacgtggcatttgttaaagagcacaagggaaggaaacgcgcaggaccatgcatgcatgcaagacagtgtgtggaaatcctaggtgtgtgcatacgttgttgccgtgtgcaggagctgcgcccggtgggcaagtgctttgtcaagctgcccaagttcaaggtagagagccagctcagccttaagaccgtgctgcacaagctcggcgtcaagcaggcattcggaggtagcgccgacttcagccgcctcagcgacaccaagatgtttgtcagcgacgtcgttcacaaggtaagggcgcgcatggatgcatcgatggtacggtatgcatggtgccaggatggcgatagagtgtgtgcgggcggggggcagccgatgcagcatggggccctgggcgagcccatggtccttcagccctctctctggtcaccagattgaagggtagcctgcctgcatcttccctggcgctcctctcctggcacggactcgtcaaccaccgaacgaacgtcccctgtgccaaacgaacgttgcctttgcctgttgctgctgcgcaggccgtggtggaggtggacgaggagggcacggtggcggccgccgccaccgccgtcatgatgctgcgctgtgcgctgccgatgcccacgcccgagttcattttcaaccgccccttcgccttcatcatcatgcacacccccaccggcctgcccgcgttcgtgggcaccgtgaacgaccccagccagtga

SEQ ID NO: 68 - DNA, 3074 bp, Chlamydomonas reinhardtii
atgaggctcctagttgcctgtgctctattggcactactgcagctcagcgctgcagtgcgcctgcccgcggcgatagagcaggctgtggggaggcagctcctgagcgagaaggaccatagctaccagcctgatgacaaggtgccgctgtgggctagcaaggttggacccttcaccaaccccaggtaaggctccgggcgctccagcgcgacttgcgcgtccaaccggcacaacagccagcgacaacaatttgccctctgcgccgcgcagcgagacatacgagtattacagccttccttactgccagcctaaggatggcgtgaagcacaagctgctgggcatgggcgaggtggtcgacgcaaaccgcatggccagcaccccctaccagctgcagttccgcaagaaccgccagcgcgaggcggtctgcgagcagcttctggatcaggagaagcttgcaaaattccgcaaggtgcgggggtttgcactgcgggggcctgcgggcgcttaaaacgaccacccgtcacatttgtgcatctgcgcgcgcaggcggtcgaggaggactggtactttcaaatgtactatgacgacctgcctgtgtggggtttcatcggcaagatggagaagctgttcaagccgggcggtgttaccgagtacaagtattacctcttcactcacatcgactttgacatcaagtacaacgacgacagcgtgattgagattaatgtctccacagacccccaggaggccgtggatatctcggaggagattacggacatcgtgaaggcgaagttcacgtactcggtgaagtggacccccacgctaaccaagtttgagcaccgcctggatcgctacgagcgctttcccctcaaccccgtgcacctggaggtgcgtagggctattcagaacctgcgctctggtggtgaagtgcgtctcgacttcaggctcatgtagcagtgcaggcacggcacacatacacataatcatatgcaccctatcccggcttcaactcgcagattcactggttctccatcatcaactcgtgcgttaccgtgctgctgctgacgggtttcctggcgactatcctgatgcgcgtgctgaaggcggacttcattaagtacaacaaggacgatcgtgagtcagggccacctgagaaaccgcaggctgtgcttgggcgagacaaccgaggctggctactaaagatcgatggacatgcagccgatggacatgccgttgggacagctgttgcatggcggcacaaatggcaatgcacgtgtcggggataggcaatgagcacacattccggggacaggtctccttgcttacagtgtgcaaccggccctgcaactgcagcggccatggaagaggaggagtcgggctggaagtacgtgcacggcgacgtgttccgcttccctccctacaagaacctgttctgtgcctttgttggcacgggcacccaggtgcggagcctaacgcagggtggcgggactggaggcgcttggtcgtccagcacagacggttgccatcatgatggggaaagcgcacatggggcgggcggccacgcagcaaacctcaagttgtttcgcaaggctgagccgtgcgagcatgactcctgcaaacagcggaacggtagaagggtgcctggaaatcgaaggaggaggggttctgggaccggtgtgatcgggcgcacctcacgtatttcagggaaagggctgtctcaaggacggttcacgggctgacatgcttcgggaacaacggatgggcttggcggcgcacgtgttgccgaatgctacatcactgacaaccggtcgcgtggacgctttgctgccccgcagctcttctatctggcgctgtttgtgttcgtgctggcgctggtgggcgtgttctacccgtacaaccgcggcgctctgtactcggccctcattgcgctttacgcgctcacggccggtattgccggcttcgtggcgtcgtcctactacaagcaaatggagggcgagctgtgggttcgcaacatcctgctcacttgcttcgtgtactgcggccccttcctgctcatgttctccttcctgaacaccgtggccatcgtgtaccgggtgagtggagcaaaagctgctggtgctggagcgccacgctactggattgcgggctaagggatagcatctctgcatgggctagtaacatcgacatcgggcggggcatgtttgctgcacttcatgtgagactgtgtcagaccatctgtactactcgcacgtttgcactcttgcacctacagtccaccgcggcgctgcctttcggcaccatcgtcatcatgatcctcatctggactctggtgaccatcccgctgaccgtgttcggtggcattgccggcaagaacaaccggtcagcatgggcgccctactcaaagggtctatgtttgggagatgacggcaccggacagggcgccgcagggatgtcatgaccggttgcgcatgttgctgtagcggggggttgggaatggtctttgctgctggctgacgccgtgtggctgacgattactccttcccgctgcctctcctgtctgtgccgcccgcagcgctgagttcttcgcgccctgccgcaccaacaagtacccccgcgagatcccgcagctgccctggtaccgcaccacggtgccgcagatggtcatggccggcttcctgcccttctccgccatctacgtggagctctactacatcttcgccagcgtgtggggccacaaggtgtacatcatctggtccatcctggccattgtgtacatcatcctcatcgtcgtcactgccttcatcaccattgcgctgacctacttccagctggcggtggaggaccaccagtggtggtggcgctcgttcctgtgcggcggctccacgggcatcttcgtgtacggctactgcttctactactactacgcccgctcggacatgagcggcttcatgcagacgacgttcttctttggctatatggccatggtctgcttcggcttcttcctgatgctgggcactgtgggctggcgcgcgtcgctgatgttcgtgcgccacatctaccgcgccatcaagtgcgagtaa

SEQ ID NO: 69 - DNA, 941 bp, Chlamydomonas reinhardtii
atggaggttatcaccgctgtcaaagcagtcaaagctgctgctgcctctcgcggcgtgaagggcgtggagttagggcagctcatggcctgcctggcctcgatacctgctgaggagtaccgcgccttcattcttccaatagccgatgaccccgaggcggtctttgcgtacgtgcaactccgttacaaggctcaaggtaggctctccgtctgtgtcgctaccgtcaagctgtctgggttttgttggccttggtgctgagctctgcgtgcctcttgcgcaggtgtggggtttggctctcacaacagggcgagcatatcgagtgagtttgggtcagccagctccatcaaacgtcgggcgcgcagggtcactgtggggcgctaccgcggggctgggcttgtggggggtggcaaggtggcgtcgtgtgcgcaacaagacaaggttgcaaggcgcctaatgtcagaaatggacgggtgtgtgtgtgtggtgcggaactacggatcttgagcagctctgcacagcagctctgcacagcagcctcactgcacggcaagggcggggcccatgcgcccaccccctatgtctgtggccctttgcagcggcgccggctgtcggagctcgcgcgcccactgcgcagcagccgtacgccgacatggcgatgctgaaggacgcgctggcggagcagatgcggccgctgatgtccaaattgcaggaggtgctggctgacaacgcggcgcggcatcaccaccccaactgggccgacgttcgacgggagtgggctatggtaagcttgaggttttgccaggcttcggtggtagactctgacattgcacgacggattgatcctgtgccgctttcctaaccatccttgcaacgccccccccccccatgcactgcgaccctagcagagcacggcggcagtgcccaagcagaagaaggtgttgtga

SEQ ID NO: 70 - DNA, 5211 bp, Chlamydomonas reinhardtii
atgggctgtgtcggttcgaaggaggatgctgcggatgttgcaaaggcccctcccaggtagctgggaaagcaaatcgcgaccgggccgagtctgttggtcacgcgatgggcgggttgctgaccaacgttgcacctgtttgcagggccgaagccggtaatggcaatggacatgtagatgctgtaaaagctcaagcagccgcggcacagccggcccctgctgccgcgccagccccagccctgctggtcgaagcccctccaccggccccgcctgcagctcaagccgctcccgcagtgccaacgccccaacccttgtacaacgggccagatcaagggttgcctgcaccgcggcaagcacctccaccggccccgcaaggcgagtcagcgagggcagaaatcatcgctgaaagttttctaattttaacggtttcgcaggtgctgcgcctcctcctcatcatggaccaccaaggcgggagcgttcagagttaaagaagcggcaggggacggaatatgaggaggattcggactgggaccagtgctccacagcaaacttcaacgttgacgaggatgcgcaggccaaaggtgagtcacaagttaccgcatgggtccattaaacctggctaagaggtcccctggccgcagattgcgaggtgccagcggtcggggcaagcgtcatggagaaggcgctgcacaattcgctatttgctcaggagaagcacgtgcccgggccggacaacgtgtacaagtacgtcgtggataaccgggccgcaatgtcacttacagatgtattgccccagagcgctgaactcgctttttcttggctgttcacagggagacgacgacgctgcgcatagacaaagtgaaagggtgcatgtttgtgaaccagtacctggtggtccgtttccttggtcgcggcgcgtgcggcaaggtgttcctgtgcctgaacacgtacgacctgcggctgtacgcgatgaaggtggggggggggggcgcgttgatgtaggatgtcggggagtgggaggtgcgcagagaggtgcgggcacagggtcaaagtggtattggcagccgccgctgcaggagtacggcgtggaggggaggcaaataggtattgtcgtgctgggtggcgacgggagacgggatgaatgcggccgctgaggagagggtgaggggacctcagagaagctcaggcaggggcgccagaggcatgacgaaagtaagggggagggctggagccggggagtggcccggacaaagccgggaaacaggcgcgagctttctgtgcaccctgcgcccccaccaacacacacgacacgtcatctccttgtgtgcctgtgtggcggcccccgcctgcctgccccacttcaggcggtgcgcaaggtggacctggagagctcgcagccgccgcagcagggcgccaaaaagcgcaaccccatggaggacctgaagcgcgaaatcatgatcatgaagaagatgaagcacaccaacatcgtgacgctgagcgaggtgattgacgaccccgccggctccaagctgctgctggtgatggagtacatggagggcgggccggtgctgacgcgcgaggcgctggagaagcgggagcggctgccggagagcctggcgctgcagtacttccgggacatgatcaaggtgggctggggggggcaggaaagggcggagggggagggggggagggagggggaggggccggggggagaggggcgtgtgattggggagggaggagaggggaggagggggaggagaggaggggaggaaggagaggggagcggagtcgaggggaagggtggcaaggggaggaagggaaggagagggaggagaggggaggggagggcatggggaatggggggggggtaatacgttccaggacccaaagcaagccgaccgagtgagcccaggaggggagggggggggatggggaaggggaggggaggggagcagaggggagaggagaggagacgggggagggggtggcgggagggaacgggaggggacgggaggagggtggagggaggggtggagaggcgagaggagggcaagagagggaaggagagagggtgtgtggagggagggggcggaaggtggccggaggaaggggcgaaaaggcggtttacggcgacttggagggaagaagggtttaagattggccgtagattcgttgtagctgtggcagacggggatgggatggtatggtgctggtgggatggtattttgcaggagggaagctggagaagaacccagggcaggagcgacgaggggcggcacatcatggctggctttcggaaagtgtctggaactgccgtcaacgcggccacggccagcactagcagcaagggtcttggggttgacggcggcccaggccagcggtgcccggaggcgcgactacggtacatctcctcaaacacagatgccgcggccttatcagaggctgccttgagcctcgtaacagcatacgaccaacacgcggccactccctctcatcctaacgctctccctcactccctctacatataggctctggactacctacacggcaacaaggtggtgcacggcgacctgaagccggagaacgtgctcatggccgccagcggggaggtgaagttgtccgacttcggctgctccaaggtgttcgccaccggcaacgagtacctggagcgctgcaacggcacacccgccttcctggcaccggagatgatgaagcccaacacgcgctaccggtaaggcgggcgcgcgaggggaggcagggccggggcggaggagggcgcccggggctggggggcagggcgggaagggaaggtatagttcgtaccctacgcaataatgcagccggcacgccaccttctgcaactgcgagctggcgttggcgcctcaggccagccatgcctggccatctccgccgtcaccaccaccaacagcattgctcaccaactccctccctcctctctgcctccctccctgccgtcccttccccccccctgtagcggccggcccacggacgtgtacgcgctgggcgcctgcctgtacacgctgctgttcgggcggatccccttctccgcgcccaacctgtacaagctgttccaggtggtgcagaacgagccggtcaagtacccgccggacgtgcccatcaccgaggagctgaaggacctgctggcgcgcatgctcaccaaggtgcggcgcgcgcgccacgtgtgcggggcactacgtacatgacgggggcgggggcggcgcgaggcggcggcagatggcgcacgtggcttcggtgatatgttcttgaatgtacatcgcggggagccgcgtgcgtcaggctaagtgcggtgtggcgccacaaacgccggcggcccggttccacacgcatggattcggcatgcgcccatccgtctttgccctgttctctttggcctgtcacagaaccctcgcgagcgcatcggcatgtcggagctgatgcgccacccctggctcaccatgaacaaccgcttcccgctcaagccctaccgcgagctgcgcgagggcgagagccaggagatgcacaacggcgtgatgggcggcctgacgtttgcggaggccaaccccaagcccgacttcctcacgggcctggccaacgtgagccgccacgagcgcgtgttccaggagggcgacatcatcatgcgccagggagaccagggtgagtgcggacggcgggggctggggcagcgggaagttggacacctccgcgcacacttgctcacctacacgccgcaccgctgttccgcgcgccgcaggcacctacctgttgtacgtggtcagcggcaccgtggacatcctggtcaagtgggtcaccatgccgcgccgcaccaacagcgcgcaggtggcgcaggggcagcagggcgtgccgggcgccaagcccgccgccaagccgggcgcgggcgtggacgagatgatggaggacagcgacaccatgtcgcccattgtggacgaggagagccgccagcaccgcgtcaacctcatgcgcgccagccagaaggcgggagagttcgtgcgctcgctgcaggccaatgcgggtgcggcggggcggcggggcggctgggcactgttacgtcgtgtgtgtgtgttggcgtgtggcgggagggcggcgggggtgctgggggatgggagggcgatggtagagaggcgcaggcagagagcgccatttcggcgtgcgtttcggcattgcgcagcttttggaatacagttaaggatgttgagctccggcacggggacatgtgaggctgaatgtgcgggcgctcgcctcgaaccaccgcaggcaccacgcgagacctgctcattgcccagcgcggccccggcgagctggtgggcgagatggcgctgttcagcaagagcctgctgcgcaccgccaccgtccgctgcgccaccaaggtggtcacgcgcgtcatcacgcacgagcagctggtgagggctgccgggggggcggcgtcggtcgaacctttaccgtagtgtcgcgactcctggggctgcgggatgctgctggatgccgctgcgggaccgcgtcgtggctccgctcgttcgtcggcaccacaggccgcggccgctggcttgctgcctccattgcgcgcggacttgcgttgacgtgccagcatctgtgcacgccctaccgcctccggtcttgctgcaactgctgctcacgcaccctcaacgtatgttgctgctatcaactcgcccgcaccgccgccgccgcccacaccgccgccgccgccacgtgcaggtggagtacgtgatggccaacccgctggccaagcaccaggtgcgcgaggtgatcctgaagaaggagagcgagatcactatggtggaggcgctggtgaagctcaccaacgtgcaggtgaggcaggaggaggaggtcagggcgggggttgggtggggggttgtaggtaccagccccagactaatacgaaaccagtcgaaaagagcaggggggtcacaaggcccagagcgattaggtcccatgttgttattgaatgggggccgccaggatggtggaggcaagcaaggcgaagcttttggttgcatgccgtattggcgacccgaagcacgcaaggaccgtacggctagaggatgccaactggcgccttgtgtggtgacaacggccctgacgcgtgtctgcaccccgacattgccacaccaccaggacgtgatcacggcctcgctggagcaggcgccgcagttttaa

SEQ ID NO: 71 - DNA, 1567 bp, Chlamydomonas reinhardtii
atgggtggcgagaagctgcttgaccagatcttcaacctaaagttcaccgccaagcagcttgcacgctcggcagtgaaatgcgagaaagaggagaaggcagagaagttgaaggtgggggtttgtgggcgcgctgggacagcaggcttggccggggcagcggcgaagtggtggtttgctggtctctccatgccatgccacgggtgcgggggcaacagggggagcgggggttgcactccggacggcatggtatcaccaggggcaagggctgctgcatgcaacggtcggccacttcctcatctgcacccaaacacgggcccaccccgatacttcccacctctgcaggtgaagaaggccatcgagaagggcaacatggagggcgccaagatctacgcccagaacgccatccgcaagaagaacgagcagctcaactacatgaagctggccagccggctggacgccacagtcagcaggctggagacgcaggccaagatgcagatggtgggttgggcggtggtggtgggtgggaagggtacgggggagggggaggagtctgaggcgccctcgtgaagttctgaagggtgaagtggggactgtgaggcagggctcagcgtccgacgtacatcataggagctggtagggcggtagatatcgccaccggatcctcggctggtaaactgtcccgcatcaaccccatcatactgctgtcacgcgtgccgtactctcctcccacccgcaggtccagaagaacatggcgggtatagtcaagagcctggagaaggccatggcctcaaacaacctggagaccatcgcaaacaccatgacgcaggtgtgcgggtgtggaggggcagggcgacagggcagggcagggcggcagcggctgcaggcgtcgaggagcaggccaggaggggcagggcgccacacatggaggtggccgggagggcaggctgcggctgcggtagggttcggggaatgggcttgaggaactttttcgtactgcagcgtcgcaaacataccggtactgtataccacggcccctgactggagttgtcactgttgcacctgtaaagaacgcatgcatcatagtcatccttcctcaccagtgaaccaatccctgactttccccgcctttcctgcctgcctcctcccctccgcgccctccctgctcccgccctgcagtttgagaagcagtttgagaacctggacctgcagacgcaggtggtggacgacgtgatgggcgcgcaggcctcgctgtccacacccgaggacgaggtgtcggcgctggtggcgcaggtgggcggctgggggacggggggacggggtccgcggcacgactggatggtgccagcatcacaatacctggtcttctgtgcgttctggacactcatgtactccccccttgtggtgcttgatgctggtgttgcctcctgctgcgctgcaggtggctgaggagcacggcctggagctggcggtgggcatgccccacgccgccgccggcaccgcccgccccgccgccgccaaggccgaggacgacctcaccgcgcgcctggcggagctgcgcggccggtag

SEQ ID NO: 72 - DNA, 4335 bp, Chlamydomonas reinhardtii
atgccgggcgagggagcagctggtgcagcgggcgggggctctgggcgtgcagcagaagtccggctctacgtcgatttcatgagtcagccctctcggtgtgtcgttatcttcagcaggtgcgtttgaaggaacacacatggttttggaggatgttgggtacgaggaacgcagtaaggcaaggcgcgaggttatggggaggcgaggggccgtctagggtttcgacacgtgcattccacgccgtcctgccgagtttcgcagcacgtcggggatggtgggcatcgggactgcggcgccggctcccccggtggggctactgcaacgcatgttgcacttaaaagcgacgcgccacacctgtgtgtttgcatccactgctgctccctcgaccacacacctccctcacgtaccacccagtgccgcactcagtaccgtacccagctccgtcatctcaaaaccctcatacgacatactcctgcgctcctccgccggccccgccttccccggcccccaaaaatcctccattttccagggtaaacggcctgccagtggaggtccgacccatcttcatacacaagggcgagacacgctcccctgcctacttggcgctgaacccgctgggcaaggtatgtgtacggcaccatgtgggtctcccctgtatatgtccacccaagtcacagcgcgtcacagcacgtctcagcaagtcccagcatgacgtcgcatgcctactgtagtacggttagccacacgcaggcgcatcagcgcttgttgatatcacgcgtacacacctagcgaccccgcgctgcgcccgcgacttgcccgatgcctgccctcaggtgccgctgctggaagacacggccgcagctgcctccagctcctccgggcccggacccggacccgccgcagccgcgggcggagctggcggcagctgcgtcctgcgcctgcccgagagcgccgccatcatgagctacctcgctgacaggtgcggactgcggcctgcggaaggaaaggggaaggagtgctgaggggggaagtaaataccagcccggtgaatactagcggagcacaggcagaggtgacagttgcaagcgatgatattagggtgggttgatgtgcgctagatgtgaggcgcaaggcgcaagcaagcgggttgataagtatggcatccctgcgcgcttgccatgcacaaacgcacacaaacacgcacacacacacacacacacacacacacacacacacacacacacacacacacacacacacacacacacacacacacatacacacacacacacacaaacgcacatgaacacacacacacacacacaaacacacaaacgcgcgctgtctttgcgcaatgttttccttgctctctttcacacacgcgcgcgcgcgcaattgcgccacgcatgcacagtgtcggcgtcttctccgttggcctttcacagctacacgatcccccacacgcccaccgcaccgctcccgcaccgcccccacaccgccccacacgcccccacaccgcccccacacacgccctcgcaccgcccccgcaccgcccccgccctcgcactgccctcgccgcaggttcccgggccgtgtggcggagcactggttcccgcggtcggacctggcgcaccgggcccgggtggaggcggcgctgcactggtaccagggtgaggcgcggcagtagcagcagcggctgggagagtgtccgtgtgtgtgtgggggggggaggggcgtggggggtatgtgccggggcccgatgaaaactcccatcttcatcatccgcgtggggacacgcacggagtggggagcggtgcagtttattccaacctaaaggcaccaaggtccaggaccagcccacagagtacggaggagtttgggccttagtgttggggtagttgctcgcggtacagtaccaggaagaagcaggaacttagggacgcagcccgtgacgactcacaacacgtacacatacctgtgtgtctccatgtagtggatgtgttctgcctttctcttctcatcagccgagtgcttgcctaggggcggatcacccgctcggccctacggtgctttggccaggagtggcggcagcgtggtggccctgctgagcctggtgtgcctcgctgccgcagtttgtcccgagtactcaatcactcgacttgaggaggcaaccgtgtcaccgtacttatgatacacacgcatacacacacacgtacacacacatacacacctcaggcaatattcgtgccggcgccgccaagctgtcattccacaaggtgattgccaagcggctgggtgtgcccagtgacgagcgagtggcgttggacgcactcaagacactgcaggtgggtgtggaactgtgcatgtgtgtgtgggcatttgggtgtgtggatgcggggtagttatttccaatcccagagaaaccgagacccggattcagcccagacagattccctggatgctcttgagcctgtactcttagggggctgttagggaagtcagtgtgtgaacggatgtggaagtgcagctctcgcgtgcgtgtgcgctggcacatggccctcgacctctcgtgacacaagtgtgtggggactacggggaccattgcttcatcatgccgtcgtgcactaccgtaaaacacacgctcgcgcggtctttccctgcagctggccctgtcggcgcttcaagacgtgtggttgggcggcggtgtcaggtgaggggtctccgccgccccgcctcatcgccggcctcaccgtaaaacactctcaaacctccccggacttcaagcagttagtggggccacatggactcgaacccctgtgaatgttgggcgggcttgttgcctttttcaacaaccgcccacgcacacgcacgcacacacacacacacacacacacacacacacgcacacatacattgtcgcatacactgtctttgcgcactgtctttgcgcaacgttttccttgtgctctttaaaacacacacacacacacacacacacacacacacacacacacacacacacacacgggcacacgccctttcctgccagccgagtcagcccgacccagcgtctctacaaccgccgcccgccatgcgccccatgcagccgggcgctatttgcagccgcgcggccccagactccttccctttcacgggcatagttagtgggtgggctttgggatgcgtgttaggacattagatagcttgcttgctgcacgccgccctcttccaccgctgccatttcacatgtccgtgacacttctgtgctgccgcccaatgcctttccattcccatgcttataggtgagctcgactacgaccagcgggcgggaatacgggaattaggcgtgctgggtaaacgttgtttagcgcgcccagggtgcggagcatggacgcatacaggtgcatcgcggggtcaggccgaatggtcgcccgtggggttacaggcttatcgcgggtaagtatgactacctgggtgacgacaaccacgcgacgctcggtaaattggtaggtatccgtaagtaactccggcgtcgtctgggcgggctttcgtttcgttttttaacacacacacacacacacacagcccgttccacgtcctacctctgccacgcacacacgcgcacacgcaggcgcttcatgaccggcgagctgccgtgcgcggccgacctgctggcgtgctgcgagctggagcagctgcgcatgctgcgtgcggttgagcacggcacggacatggaggccctgatggcgccctacccgcaggtgggtgggtgcgccactgcgtgtctgtgttaaaaagacagaaggaaaaagtctcgcaaagactgtatgtctttgtgagttcgtgcgtgtgtgtgtgtgtgtgtgtgtgtgtgtgtgtgtgtgtgtgtgtgtgtgtgtgtgtgtgtgtgtgttaacgagcacacggaatgattaacgtgtgtgcatgtgttgggagagagggccgacaaccgtgaacgcgcaatgtgtgctgatgctttcatgtatgcgttggcgtgcatgtgttagcatgtgtgtgcgcgcgcggcagcggatgggtcaccgctggcttccggcctccgcactgcacacacatgtcgcaacctgctggtggggtgttgcgtccccccccccccgtggcccccacgtggcccccctccccgcgcaggtgcttgcgtggcagcagcgcgtgcgcgatgccacctcgccgcactacgcccaagtgcaccgcgtgctcatggcggcggtggcgcagaaggcggcgccggcggggtcgggggcggtggcgggggcgggggcgggtggggcgggcggcggcgcggcgcagagcaagctgtga

SEQ ID NO: 73 - DNA, 5783 bp, Chlamydomonas reinhardtii
atgtcggcatttgaggagctgggcgtcatgccggagctggcaaaggcggtagaggacctggggtggatgtgagtatggcgcttgggtgccacgcgtgcacccgtacgggggcgcaggccacggcagctgctgacacaagccccgccactcactgcttgtgcgggctgcctcctgctgtaatctgcgtgtgtgtggagggggggctgcaatccgagggggaggctacatgggctgccctcagacctgactgatagtacctgatggtctggccttcacctgacataccccacatccactggtgtgctggcctgtaggctgccctcgccggttcaggccgaggccattcccctcatcctgggcggcggcgacgtcatggcggcggcggagaccggcagcggcaagacaggcgtaagtgtgggcttaagcagcgagcaggcggtaaggaatgacacgggccaaacgccaaaagctcatggaagcgtctgcaagacaacaccgcggtccttgccgtagagcgtgaattgcatgacggggtcatgaggaggtaaacatcgcccccacgacactcagcgaccagctaaatcacacgcgctgcacgcatgcgcatgcaatgccatcgcatgcacaggccttcgccattcccatgctccaaatcgtgcacgagactctgcgccagcgtgcgcgcagcggctccgccgccagcaccagcggccgcggcgcagccggggccgcagccgcagccgccagccccgcagccgtgccgtgtgtgctgagtagcgaggaccgggagctgcacgtggcggtgtcgccggacgggctgtcggcacagagccgctcggagaaggcgtggggcggcgtgcgcggcagcgtgggtgtgttcgccagctgcggcggcaaggtgtactatgaggtgcgtcgctgcgggtccatgacgggggcccggctggagagcgcgtggggtggtgcgtagcgctgcgtgctgagtcgctgagtactgaccaggaacggcgtgcctaactgaccgcaggtgacggtgactgacgaggggttgtgtcgagtgggctggagctgccccaccgctgcgttggagctggggacagacaggtccgtgtgactggctagggagccgtgcagcgcgttgcgtcctgctgagtaagctggtgctttcaaagtcgtccgcgtctgcctgcccctgcacttgagctgccctgaccggccctgccgtgtcctgcgccccgagcaggctgggctggggctttggcggcaccggcaagaagagccacaaccgccagttcgacagctacggcgagccgtgagtgccgggtgggcggggccgcgctgggacgtgcctctctttctgcttccccagctcactgtttgtcaacgttgccaggcgtcggtcgccatgcccctgcatgactactgccgtgctgccctgcgcccaggttcgccctgaacgacgtggtgggctgcctgctggactgcggcgaggccggcggcagtgtggccttcaccaagaacggccggccgctgggcgaggcgttcaagctgccagacaacctgcgcaaccaggtgcgggccgtgcgggagccgggcgccagggctcggctggccagggttggaggcccgcggactgggcgttgcggaccgcgctgtttctgtttatgagcgccgtgagacttcgcgtacatagtgctgatttgtgtgtgccggcccacgatccaaagccaatggacacgtagcgtccgcctatgcgcaacgtcggacgcacgcccccatggcggcgtgacctctacactggctgattcgatgctgctcacgccgcctcaggttctgcaccccgccataacgctcaagaacgccgaggtcgcgctcaactttggcgccacgccgcttgccttcccgccgccgcccggctacatcccgctcgctcaggcgccagccgcctgggtggcggcgggtggcggcgcagccgccgccagcgcaggtggcggcggaaacggccgcggtgagaaggaccttgggcgcaagcctgtgtgccttatcttggagcctgccaaggacttggcggagcagacagccaactgcttcaacgactacggcaaacacctgaaggcgccggaagtgaagacggggctgttcgtgggcggcatggatgcagcgccgcaggtgggcgtcaggcgtgagggtgaaggtccaggccgtgccgtgcacatgtggtccaacactccaacggggctgcgcggcccgcgctggcctgactgtaaggcgttgctgtactccccccatgtccacgaaacaaattgtgatcaatacccccgctccccctgggcgccaccagattcggatgctgcgtgagggagtggatgttgtggtgggcacacccggccgcgtgatcgacttcgtggagagcggcaagatccctctagaccaggtgcggcgcggcggggggtgggaggggatgtcagcaggtgcctgcgctcgcccgtcacaccttgcttcccctagagctcacggcccacctcgcgtgtgctgtgttcgcagatccgctttttcgtgctggacgaggcggaccggtgaggcactcagccagctgtagtgctgtgtctcattgcgttctgcgcagcctcatcttgtcccaatgcatgccccagtgtgccgtgtgcccgtgcatccctcccccgtcatccccatcctcgtgctcctccggcccggcccaggctcatcgcggacaacccggacgtgatcaccaagctctacggccgcctgcccaagcagggcaccggcattcacaggctgcaggtgtgcgcgccagaaacgcccctcgcgcaggcaacgcatctctgtacaccgcacaccttgccaaagccccctgccccccagacacaccttccacgccacctgcctccgcctgcctccgcctgcctccgcctgcctccgcctgcctccgcctgcctccgcctgcctccgcctgcctgcctgcctccgcctgcctgcctgcctccgcctgctgcctcaggtgctcctgttcagcgccacgctgcactcgcccgaggtgaaggacatggctggccgcatctgcatcaaccccatcctggtcgacctcaagggccgcgacgcagtgccggagaccgtcgaccatgtgctggtgagggcaggggcgagggcggagcgagggagggaggcagagggaggcagagggagggaggcggggcagaggaaggaaggcagggcatgcgcggcgacaggggcgatgagtcaccggtagtgatgttggctcgcaagtgcgagcagtgtgttgaacgaggtgctccatgttgcaccactcgggcgtgtgtgcctcaccggctgcaggtgcgggtggatccgcgcgaggacaggagctggctgcagagcaatcccgaggtgagacgaagtttggggcacgggcaagaggcgggccgagtgcagctgcgaaaaggagtccgccctgataccaacgtgccacctagggtagcagcagttcagccatggctgctcggctcacgtgctgcccacgccctctaccgcacccttcatctcacaccccacaccgcgcacttcgtgccgcgccgccccccacggccgtgcaaccaggtgttcacggacagctgccacgcactggaccgggtgggccccaacgccgcggccagccccgagtgcctgagcgagggcgtcaagcgcctcaagcagcgcctgctgcagcgcatcatagacaccatgaagatggagcagtgagtgggcgcagccggcatgcgtcttgcttgtgtcttgatggtgtgtcggtgtctttatggcgtggtggtctaccgtagcgtcagcgctgggcgagggagggaggcaagcaagggagcggggctgtgcgtctgaccactgctacgctttggcttgtggcggaagcgcctgaggggcctggcaccgcgcattccgcccccaggtgcctgatcttctgccgcaccaaccacgactgcgaccagctcgagcgcttcctcaacacgctgggcggggcaggcggcggggcaggcggccgcggcttccgtggcaagcgcgagagcggcaaggagaacccctacagctgctgcgtgctggcgggcgcacgcaggtgagcgcttgccgcacagcagcttccgtagccattgtgcccgccgttccctcgctctcactctcaggctttcccctcttcacgcctcgctcgctgttgatccctcacacgccctttatacgccgggccttaccctccaccccgccatatcctgcccctacgcctgctgtctacttcgctacacttctctgtaccaatctttgcaagcccccatcgcaccccaccgcactgcaccccctgctttacagcatggacgagcggcgcgccgcgctgtccgcgttcaaggacggggacgtgcgcttcctcatcgccactgacgtggccgcgcgcggcattgacatccgcgagctgccctacgtcatcaacatgaccctgcccgacaaaagcgaggactacatacacagggtgcgtgtatccttgtgtgtattcgtgcgcttgcgtgtctacatgtgtgtctttacatgcgcacgtgtggcaatgtaagtcggtaaatgtgtggaggcattgggcgatgtggacgtgctgtcacatgactgcgcgcaccggggccaccaggaggtcgggccgagtgatgctgggcgaaggaaacgatgccaagtcgcacagagtacacgggcatgactgctgccaagcccgcactgcccccgtgctgcatcacgacgatccacggatccgccgcactcgcaacaacgccagcgctttgcactggacaaacacacgtgcgcagattgggcgcgtgggccgcgccgacaccatgggtctggccatcagcctggtggccgaggtgccggagaaggtgtggttctgcaccgtcaagggcatgaaaccctggctggcgcccgacagcagcaacacgcgcaccacggacaagggcgggcacacaatctggtgagggctgatgagaggacgccaaggattgttggggtgtgactcgcctggcggagtggaaggctgcggaggacctggtgttggggcgggctttgcctgtaggattgcggcttgggtttgataccccacatacacggacaatcgaaaccaagtctgcaggtgcataaggtgcctatgaccaccgcgctattgccgccctcctccgcacacgcgcacacttgcctcacacgcccccacaacccacacaacacaaccaggtacaacgagcgcgagttgctgggcgccattgaggggcggctgggccggcccatcccgcccatgtcggacgacctcacgctgccgccggagctggcggagcggctcagcgcggcgggggacaagtacggccagcagcgcggtggcggagtcagcaaggaggtgggcgcgagggcacagagggttgtgcgcggggccgtgggagggatactgctggtgggtgcacgccatgcctgtcgtggcccttgcagcaaaggtgccgcggcgtcgagcaagccgggcgcctgtttcttcctttccagtcgtggccccgcaggcggcctgcccggctttccgcgcatttttcctgtgctcatgtccttaccggtatgttctctggttgccttgcgctccccccatcgcggtcggcccacaggtgacggagcacctggcggcgatagcgtccaacgtggcgcagctggctgggctggagtggcaggtgcaaaccagctacctcagcctcaaacggaaatggggctag

SEQ ID NO: 74 - DNA, 1879 bp, Chlamydomonas reinhardtii
atgctctcctgcagtgctctgtctcgcgcgggccttccacgcgcttcacggcaacccctcgttcgccgctctgacctgctgctggcaaggcagaacgaggcatggatatctgggcaaggtgagataaatggattgaaaatgccgcgacatcgcataactgtggcgtaatgtagagttgtagattgaccagcgctttgctgcggctgtgcgtgggtagcagaccccgtgtatgctgttaactggggttgggttgcttgctcgctatgccgcaacacgcgcttgccaaaccctatcgcgaacttcgcgtttcctcaagctcctgagaccgccccaatacttatgcgacttcccttgtgatttgacattgcttgtactgcatctgataggccttggatggtgcagtcgcgttcgcgccgtcgagacactcgctgcaggcccagccggcgaggcgatcgccgagcttatttgggagcttccggcaggcttggccaagcgtgttttcattgctttttgggatatcaaggagcaggtgagtcgccctatccggtagctggcatgtgtgaagggtaggccactgagaaggttggggcacccacccaggcagcatccacgggcagcatccctactgaagtattgatgatttggcagctgtccccagctctcacaccaagtgtgggctttgtgggctactcacatacatcaacacgtcgttgctgccatctatatgtcaggcccaaggtaactaattcgctgacacgccccttacgtcgccgccgtgcccaaccagctggcggccaagtccgaccaactggcggccaagtccgaccagctggcgacaaaaactgaggagctgtacaagatcaaggtggagctcacgcgcgcgctccacgctgcaggcgtcgtgaacgcccgcacgttcctgggtgggtcgatcatcgcgatggcaatgaatgcttgttgggtcccagtagtcccgtgggttgctttcttactgctggacaagcagagtgcagctgtaagggtgctcgtgtccgacactgccacttctgcagagtacgtggtgaagcagtgggagcacgagctgttcggctctgtggggaaggtgaaccgcctgaaggtcatcaaggcggggctccgcaagcgcccggagctggtgaagtgcctgcagcggaacgtgcccacctgggtgcgcgccggcatggacgaggagcggatcggtgcgtatgttggtagaggccgctggtgaaacctacagcaagcacgggcgggcagccattagcagttcttgatgcatcctctcgagggatggaaggtggagtggatgagttcattccaggaatcctaggcagtcggggggctggtggggttctcatggcatgtttcgacagcagcatattcagagcacgcttgtagctagcggtcgcaaccatgccccgcttgcactccaactccgttattggccgttcacttgacagtggaaaatatggccaagaacctggaggccatcatgctggactccagcaacaatgtgcacacgttccaccccgcgattgggctgactctgctcaaggcggcgcacagcgagcccatggtggctgcgctggtgtgcgttgcagacaacatgggagtgctggtcaaagtcattaaaatggtgagtaagctttttgtgaagcattgtgggcctcatcaagcctttgatcctggctgtgggtgcaaagacggttcgccagttgcttgaagcaagctgcaccaagaaatagtgcatgggcttgtgtcctgtctcacgcctgggtacctcgacacggacgcggtgtgtgcctccattgcatccatgcagaacgcgatgaacgacaacaatgacaacaacatctctgcgtga

SEQ ID NO: 75 - DNA, 8057 bp, Chlamydomonas reinhardtii
atgacgttggacctgctccttgcagacattgccgacggttcaatcttgacctcggggggcgacagcctggtctgctttgagaaaaccggtcagcggcgctggctgttccggttcaaccgcaagaccgaggtagtggccgacaatcagaccttcacctactcggcacgccaggtgtgtggcaatcgatgtcgtgtccatacggccgtcgcatgcttgactcgcggtaacaggctcggtagatagtggacggccagtagtgatggtgggatggacgcatgcggcctttgcttggggaaacgaagaagtcagcggaacaccaacgttgcgcaaggccttgctcgcatgtgcgtggctagccgaatggactgtatccttgcaggggagggcatgcagtgcttatcacccagccagcagcgagtggatggggtcgcggcgccacgccgcaagtttctctgcttgcgcgtggtacgatttgctctgtgtgcatacgtgccgctgcccctgatttactcaggatggtgccagcccctttatcgcggtatcgagcaccggccttgtttacctggccgccgccgacgcagttctgtatgcgctggtgggtagtgttatgggatatgaagtcaggcaatgtccgggcaagtcggcaggagtgggagcaggacgaagaggaagaggcatgcatgcatggaagggtgcggcttgggagcaggacggaaagcaagaggcatgcatgcatggacgggtgcagcttgggttgaaggagtaatgcgtgggtttaagtttgacgggttgaccacctcatgcgttccaacatgatgcaccgtccgcgtgcaccgccgcacgcgccgcacgtacaggacgtgcgcaccggcgacctcgtgtggcactggcgcgacagcccctccacatttgagtccatcacgtacggcgacggccgtgtctacgtgtccacaagtgggttcaggcggtggctagctggggaacagctggataggcaatgcccccgtggagcaagtgcggtgcgtgtgtgccggctggtaacgcagctgcttgcctgctgccatgcacatgtatggcgtgtgtaacccagtcctgcttgtgaccatatttgccttaaccccgacggcctgccgtgcacgcagctgatttcaagacatatgccctggtgggtgcctgctgttgctttgcatatgggctggtcggtgttgttaccgaccatacatgcgactccctgactgacgcacgcaactcggcactgtgaatgaatgcaaactgacacctgaatcctcatgatgtcgtgcgcttgaaatgcccaaccttgcaggacgtggtaacaggggaggttttgtgggggacgcagttccggcgtgtgtcctcctggaccaccggctggttcaagggcgtgtttgtgcgcccagacgtggacgggtgagttgcgtcgcactgtcgtggagggcagcctcgtgctcagctatggacttcaagcggcacgaggcattgcgcgcctcacaccacgtgttccctacatgtcagttttgatgtgggccacgcacaccattgtccatccatcggccttggcctggccatgcctgcctacctgtgccgccggctactgtacgtgcaggcgcgtgtggggcgtggatgctgaaacgggcgacctcatttggatgttcaacatgggtgctgagattcaataccggtgggacccggaactgcacttccatccctcgggcattggattcatgatggctcggccctcccagatctgggcatacaacgtgacttcgggtgggtagtggtaatacggctgctaggcgcatcgcgggtggacaaagcagggtcatttgcgaaccgtgcgtggcacacacgttcaacacgaagcggtagcgccagcgtgtgcatgcgtgtggtggttggtgctcgcctgcccgaggcacgggaaggggctcgctcgctgtgttgcgtaagaagcggagcttggcacgaactggacgggtgcaagggcgggctaggcggtaaacgattgctgatgtgtgcgggacggccgcaccgcgatgtgaggacagggcgggcccgcacggcccgcacagactggcaggatcaaccggtgcaggcacgcgactgccagacatgatccctcggcagccgctctgccgcagttacgagtacgtttgcccctgcgcttacatgtcggcggtcacaggtgacgtcctttggaagatgaatgcccgtgagggatacatgtgagcaccctggcaggcatggggtagctagaacagaaggacaggtgcacccacgaccaccaccttgacacaccagcttgatcggagcacagccgtgcctctgccgttgccaccttcaagaccaatatcctttgtgaccccgcaggagccctgacaatgatggcgacaatcggcagacgttcgaggtgtggggagacctgtgagttgccagcgggtggtacatgccggccggggagctggctggggtccccagtgtgctctgcgtacggccaaggatgcattgtgtttagtgcacgtgagagtgtttgtccactctcggagtgctgctgtgatttctgggataggcagttgggacggaggctccgggactccgccggtgtcaaccgcggctgacggacacagggcacacaaggtgccaggtggcagtgaaaacacggcgtaccttggttgtgcagtaatcgtgccgtgttcgtacagcttgcattggctatgcctccttgacgtgcacgtactgctgttgcgccccacaactatccagggtgatcgctcaagatgagggcgccgttgaaaccaaccccaacaagtacggcatccttcaggtgcgacagtttacggcaccgattgaaccctgcatttaaaacattggcatgctttcatcgtcgccaaaccttctgagcggctcttgactcagtttacgcattactcacacgccaggctctggacgtgttcactggcgtgcgtgtgtggatccgcgacgacgtctacccggtgcgtggctggcgttcgttcaatgcatgcatgtgcgcgcgtgcactcgctgtcagctgctggcgtcactagcaggctgcgtgtgtcggtagtgagtgtgatgtcctggtgtggtacggaatgcacggcaaccacatgcatggttgtgccatgccgcacaggcgtacatgcatcaattacggtgtcgagtgtgtcacatacatgctcaacccatgtatgcatgctactgggaatttgtgcatgcatgtgcagggcaagtacggcatggtggtcaccgaggggctgctggtctacaccacctacataccggatatgtctaccctggacgtgtcttcttcgctcctggtgaggcacctgtccggtatgtagccagtgatggtgcgatcgaccgcagcgagcagggcagcgggcagggcagcgagcagggcagcgaccagggccggcttgcatggggcgacggtagcggtggcggcggcggccagccagtacccacgcagcgcgcccgtgagcattgtcgtgcggtgccacggtgcccggtccgcaacacatgtatctcctgctcaccacaacgcacatgacacgggcacacaacgccacacgccacacggcgccacacagatcagcgccatgggacccgaccaccaagacgtctggaactggcagcgcgatggcgcgatacccgccggccagatccaggcgctggacgggctcgtgttcgcgctgcaaggcgagatcgccaacaccaccttcaatggcttgggctcgtccacggtgctggtggcgctgcctgccacgcccagcgtcatttgcccgcccggtgagctcgttctctcagctacccacccgtgtacttcgcaaagcaagctgaatgcatggtgggtcggcacgagacttatggaggggtgcggtatcaggagcagctatcggcgacccattgcaacagcttgcacctgcagatgctcagcgtggacatgctgcatcgcgcgcgacccttttaatgtgtgccgctcgttgttttccccggcgcagatgtcaagtccccgccaatcactgtgaacaacaaccagcaagggaccaacgctgtaatagctccgccgccgccgccgttcgtgagcggcaagcccttctgctggacgtgagctgcaagggtcgcctgaggttgcatgacgtaacgcatcggaactcatgccaggcatattgtctgaagtgccgtatcccagacggttgcacgggtgcctggctgagcgcttgctgggatctcaggtgtcaggcgcagggctgtgcacctgggtgcgactacgcaagtcaaccatgcgcgacgccgcaccttgttccctgcagtcattcattctcctacaagcctctgggcagccctacctctgacggcgtgcgggcgtacggccaggacaacgcggggttggtcattgcagtgagtattggcaccgttttttcggtccctgcgtacctgcaacccccaaacaacaaacgttcggttgcttgttgcatcgttggagtgcgcaggacccgattccagcacatttctggtaagcaagacgagatctgctctcgccctcgctatgcaggtgtacctggacacgggggctattgcctggaaggccacttgcgggcccgatagcaattcgttatactacccatccaacgtggttgtggtggacggggtggtttacctgggctgctccaatctggtgcgttgagcaagaaacatgctgagcgtgacgcggctagtatctgtcctagtgccacccacctgtgtccgaaggggcaggacgaagattggggcactgtttgttgccgtgtgtccttactttataccacgctaaaaatgctcccctctcgtcacgcacgccagtgcatttgccgtgcgtgcttgttggctgggcttatttgctcttcccacaagcgctagctgcttattccacccgccataccggcctcacaggacgtgcaagcgcgggacgcggccaccggacacttgctgtggcggcgcccatttcagctgacgcccgaccgtgcggcgtacaggggcgggatcatagggaaccccgccgtggcgaacggcaagatagtcataagtaaacccgacggctttctccaagcgctcaacatcacgaacggtgcgggaacattgtgtgtgcgcgcttcagcgagtaaacccatgcggttgtgagtgccgtcgcgggaggcacaccagggctttggcgccagcattgactgttggcacacagcaagctctcaggtggatgcatgacccggcacgtctttacggctgccaccacgtgcacactgcgttcgtgccgtgcaggccagctcgtgtggagctatgatacggtacgatcactagggctgcacacacctgtgccttcctttgtccccatatcgctgcggtgatcagccctgctcacagcagttgtaaaaagcgaacacccgtttcctgtctgcctggtcctgactgcagggcatccttgcggctgactccgtggggatccgggatggtgttgcgtacgccattgcacgtcacaacgcggaggttcgttacagtaccatcgtggctgtggacctagacaccggcaagtgacgggttcgcgcgagaggatgatagtgctatagatgaactggcctgtggcggggtgacgtgcgtggcgcatgcttgcattttggggaaaggcaaatatggctggccggcaaggacgtgccctgtgatgcatgcctctggcgtgaatgctaagtgtgtcgcactcatgcggctgctgtggcgcctacatggcaacacatgcatacaggtgtcgaggtgtttgccaaaccactggagcccaagtgggccatggaacccgggcgtctcaacttccgacacgacaacaccctggtctacgccacctggtggccggacgcgcagcttcaggccaccacgtaagcacgcagcgcccaccacaagcccctcgcctccctccgtactacaactgcttgctgctatcacccactgctgcccaacaggatcggccgcgacggtggagaccttgcatggaactaccccatctcggacagcaccgggtgcgggtgtttgctccggctgctgctctgcgtgcaggggaatcggcgtcctgcaattgtcccaactgatcttgggattggggttgcggatggggcaaggcgggcggggcaggactgggctgggctggccagcactcctacctgctgttgcctaaagcgcgtgccctccgtgacttgctgcagggtctactcggtgctggtcgtgtcgggtgaggacctgggcctgccccatgacgcgctcttctacaacgacaacgagggcctcgtcaccgccctggctctgggcagcgatgggcctacagaagtcatgtgagttcacgaacggtctgtccagcttgccagctagcagcaacacgtgccggtggcagatgggcctaacgcgcgctcattgtggctagctagctggctaagctgctgcgctgctgctggggccgggctcctggtggctgacccgaatcacctgtgctcatgtgttacatgcttggcggagtgtcggcgcgctgcgatagaccatgcacgctgatgcttgcatgcaggtggacggtggacttgaccgacgcgaggttgtggcccggggtggagaacctgctcacacctggccagtccgactgggcgcaggtcggtgtggccggaggcaatcaaggggcgcaggcttggggtcccaacagccgcctcgcacatacacgtacattggctcgcaggctctggcatgtcatcagcgtttcgcagcagcgtgcaatgtcttggtgacgcacgcctcaaacgccaacagccagcatggctgccgccgacatgtcatacatcacgcacgcatgctctgcccacacgcgctgtacgtacccccgtgctgactgatccctgcatggccgccttccgcactcgcagattacctactctaaccagacgctgtacgtccccacgacccagggaatgtttgttgtcggggccacaaacggtgggtgggccgatgggaccgacctgctgcgcacactgtccgcacaagccgtgtcttctgcatccagcctgactcctgatgcgcacgcctccgcgcgccctggtcccgcaggtgaggctctgtggtccgacctgcgctcccgcctcaacgccaacattcacgtgatcgagcggccgggcgggccccaagtcatctatggcaggtgcgcggccgtaatgcgcgacagcacgtgtgctgcttgcttggtggcctccagcgaatcaggggtgtatggctaatgcgcagcgtccctcctcatctatttcccgtgccgtttcgcatgctcactctgccgcccacacaggtacctgtctaactttgagtccaacacgcctcagtgccggccccccaagccatccggccttgtcacaaagatctctgtgcgcggttccgtgcccgctgatggcggcgaggagccctcaacgcccacagacgcgccagcgcctgacagtcgcccggtgcctgtgactgcctccccacctccatcggttactcccgcccccgccccttccccgtcgccctctcctccaccatctccctccccggcgcccgtgcgctcgccgtctcgctcctcctcgcctccgccaccaccagtgtgcccgccctgcccagccattaactgctccgcgcccgccaagaggccctcgtcgcccgccgcggtcgcagtggcactgggtctgtctggcctgccgtacaacattgtgaaagccgactccaagctccgtgaccgggttgcgggggctgtggagaagctggtcagcggcaaggtgactgggttcgtgcgtgtgcgagtgctgggtgtggagagcaccgcgggcggcacggcggctgtgctgcgcctgagcctgcagcgcagcggcggtgcgtctgctaccgctgtggcgtctgcgattgaggacgcggctctgaatggcaagctacaggaggtggtgcttgcggccaaggtgccggccaaggtgcgcagcgtggtgctgaaggtgtga

SEQ ID NO: 76 - DNA, 1615 bp, Chlamydomonas reinhardtii
atggcgctgggaggtgatcggagttgggtttggggcatgacttccttgggtccttcttgcgcaccgtggcatgttggctgacggtggtgcgccagaaatcaatgtgttgggcttagcgcatgataagagggagatgcggcatgagtgcgggccaagccttggcccgcgcggtcgtgtgggtggtatggaggggtgcaagcggtctgggtacgccatagggcgcagcagcttcccaacttcagggcctcgctcagggccgttgactgagacaacccggtcataccagtatgtgccttggtgtgtgcactctgttgtgtacaggtgtgctgtataggcaagctgccactggctccggctcaggattcaaagtgcatggccaggctgtctccctgaactcccccggcacatctccgctactgccgctgctagtgctcggcagcacgggccttgtccaggtgtcggcggcctggacggggctgggggcctgccactggcacctgccctggctgctcaatgtccagctggggctcctggcgctactactggtaagggctggcacacatgctcggagtagccggagcatcgggctttttgggagaagtgagcttcttgggagttgttcaaggccaggccacgaccatcaattttagcgcaatacagccaatggatgacacagtccatgggcgacacgcgcaatgggtgacacagctttgctccacaccacctgtcccacaccacctgtcccacagtctgagtctttgctccacaccacctgtcccacactcccacgtgcaggccagccagatgtgcatcacggccgcagtggtgtcggcgtctgaagccaaagccggtattggccgggtggcggggctgccacacgcgccatccagtggacgggaggtcttgtttgacgcgctgaggtcgcactggggccccggcattgcggtcgtggcagtggaagtaggtgctgggcggggcttgatgctataggacccaagctcttcgacgcatgcactgacatccctttcacgcccgcatgcctagcgaagtagcatgcttgaagcataagccaacgtatctgactcgtgttcttctgagcaggtgacaacattgctcgtcgcgtgtttgctacacgccatgtacatacgggcaggtgcgcacccggcgtcctggattacggatgggatggctctgagagatggtgacgtatgtgtggctagcgtcaagccgttgctgacctcttgcacctacctcatattgtgctgggcccgcagacgaagccgcggaagaagcggaagagctaggagccacccgccagggagatgcatcagcgccgttgcttactcctaggtgcgcagctgcatcgccgacggacactgtgtgcacacgctggccattcctaaatgaaccatcgagcttcgttgcagacacacagtatatatcctcgaagcacctcgggaccacctttgcccttgcatgcctgtatgtatgtgtcgtacatacggttactgtcatgatccgccccaaacgcaggcgcaatgaacatatggcgaccagcggacaacggacgggcatcgcatcacagcctacccgacatgcgagccaacgggtgtga

SEQ ID NO: 77 - DNA, 1534 bp, Chlamydomonas reinhardtii
atggccgacagctcggcgcccagctccttcacaattctagcaacggggcaactcgagtgcgctgaggtgcgggtctcttgcgcgggggcagcgggccggtgtcgcggcgagggaaccacgctggattctcgccagcagcagagggggcacgcagccgcacacacgctcgctcattccacctgctgtgtacactttttcagatccccgagtgcaccaacgcgtacctgaagttccaatttgttgccggcgaggactggcaattactggatgggctagaggagggcatcacgcaggccgcacgtgtgccagaaggtacgcgcaccagccccaccaccatcaccgtcactgcagtaacctgctaggtggcctagaagcattgccccgcaactgagggcaccacctacattgactcttctgtacggcgcgcaggtcgcgacggcgtactggtctggaacttccccatcgacatcacatacaagaccacgaacgcgttcgggtggccgcagctggtggtggcggtgtatggcctggactcgttcgggcgtgacgtcatcaagggctacggatgcatacacctacccatggcggccggccggtgagaggacagcggacggagagcgagggtccgagtgggccttggccgcggacaacccagggcgtataaggcaggacaaacggcgcatatgttgcgtggttggtaggctgcgtataaaggggtgcatagcaccacagccggcaccatagcaccacagcctagtgccggctgtggtgcattctgggtgctgcgcgttcacgcctgaatagctggggcctggtgcctgagcactttcgcttgtgtgcgtttgtacaggtacacgctcaagctgcggctgttccggccgcgctcggcgtcacttctgcagtcgttcacgtcgtggctcacgggcatgcccgccgagttctccgaccccaagttccccagctacggcgagggccgggaaggtgcgcgcagtcgggaaacacgcagcaccagattgttacttgcgttggcaagcttccgcgtgcgacctgacattgacagaagacgaagtatttcacgtgttgtgtttgctgccaccgcagtcacgcgtgtgcagtcaggtggccacgtcaaggtgcaactcaacctcatgaccaaggtgcggcggagggaaggggccagtgggcgagttcccatgtgtcctgcgttcgggttaccaaagcaggcgtcgcagtgtgcaggaactacccatgccggtgtctgggcgaggctgtgaggtagacatgtcgctgtgtcagtgaaccatgcgcccagccccgccacgataccgtgtcctaggccacgagctcgctgcgccccgctctggcatcaagtcatcaagttggacgtgcctgcttactgcctgcttattgtgctacagccgcgggctctcaccgctccgcgacacacgaccccgcccgacaggacatggacatgttcggctacgtggacggcagcgggagagaccccgccgtgagcgccatcacgcaaatgtga

SEQ ID NO: 78 - DNA, 8043 bp, Chlamydomonas reinhardtii
atgaatatcagttgctactcgtccattgtcaaggagtcagcgcggtgagactggagtaagactggagaacacccaaaacctttgtgcaagtacaatcccatgacacctgtgacctgcaggagcctttcaatgcaaagctgcttcaactaattcagacggatgaacggctgacttcggcactggatttagcggcaaccagcgcaagagctggcaagccattcgcctgcaattgctctgctgatgcgctgcagggtgggagtgtgctggtaagattatatcttttgatcttcagcgtccagccaaatcattgatgacagcttggccttgtatggtccaattgagccggggccacagtcgcactcagcgcctcgcaagtgtttgtcttaaaagcctctgatgaatgctacaatgtgctggcagcgggtgacggcgggcctgccaggacggtttaccgccaacatcacaacagaagtcagaaagtgtgcgggcccctcgtcgcaaattactcactaaacacctgatacgctgtgccgtggccatgcaggttcgcgcttgcgtttttaacgatgaccaggagcatagccagccggcaccagcggtgttactaatatgcgggggcgttcagtcgcccgcacacctcgcgccagcgccagtgaggtggggccctttcctccaatcgggcttgttcggcgacctgccgcccaccccgctgcggaccacaccggacctgctgcgcttcagctctctggggctggggctggggctggggctgcccggcgccccggcccagcagcagcaccaccaccccagtggcgttcccggcagcggtgcgcacggcgctcccagcctgctgcccacctccgtggtggactcggccgcctgcgccgtgacggtcgtgtcctggtgcagcgctagcggccgctcagccatcatgtaccaggtgcgagtgtggaaagtggaggggcggcgggtggggacttgtggcttcgggagtttccgccggggcagcccaactgatacgtgtccactccaccgctgaggcgctgaccgcaagccgcgtctgggaccttaacctgcaacctcccaatgatactcccccacccaagcaccctgaaacgcgccctcgtgcctgctccgcaactgcatgtgctgaataccaaatgtgcatgtgcgtgtggttatatgtgtgtacggcagaacgcccggtccgtggggctgtacggcagcctggccagccccgtactgcgcacacgtggcctgggcgagctgttgctgaggcggctgctggccagctccggcggcggctgcagggccggagctggcggtggcggcggcggcggcggcggctgcaggacgggcacggcggatgccgctaccagtgcggctgctggcgctgccttggggaccgcgcccagcaccaccacgtatgaccggagcaccgcaggcgatgcctcggtcggtggtggcggcggcggcggcaggcacacgggcggcggcccggtgatggtgatggcgtcaaccgccgcgggcggccccgttggctggggcgcggacgtgtggggctcgggcgacgcagaggctggggcggcgctgctgcagctgctgctggcggtttcggcagggcaggtggggcgctgaggcacggggtggaggcggctggggctggggctggggctatgccggtggctggttggggccgctcctgcgggcgaacgctgtagcgtgcaggatgggcgccgagtgaatggggctatcttgtgggcatggcgctgcaccgtcacctgttgtttccaccacaatgcccaacgaccgccgccttttccctgctgacctgtgcactcgctgctgctgctgctgctgctgctgcaggagtacgagtgcctggtccaggtggagccggaggcgctaggcacgcagctggcggcagcagcggccggcctcaccggcgccgcctcgccggcacccgcgccctttctttcgggggccggccccaacatggccagtgccgcgggcgccctggccagcggcagcagcggctcggctgcagcggggtcgggagcggcagcggcaacaggcgcaactgcgctggccctggccctgcgctcacgtccgcatggcggctcgcgctgcggcgcatcagcggcggtggacgcggcggcagcggcgctagcggcagcgcctgtgtcgtgggcgggagaagctgcgcccggggcagatggtgatggccgcggggaggcggagaggtatcccgagctcgacactatagacgcggcgcttctggaggcgttgttgggcactccagcacccgcgcctgcgacaggagcgcgcgcgggcggcaggaatgccgctgacgcggctgccaccggcaccggaatgagcgcagctgatcagcatgatcacccgcaccaacagccgtaccgccgtcatcagcagggccaggggcagcccatcagcgcttccggccgccgcgctttcacccacgacgtgcgccgcccgcgcaatgacccgctgtctgacgagtcaggggccttcgcgtcggcagctggggcagagcattcagaagcgtcggctattctcgactccagccccttcatcgcagtgccgacacccgcgcagacgccccggcctcatgctccaacagccggcgaggtggtgacggcggcgtgcgcgcctgccgcgcccaccgctgcggcacatgacggtggcggaggcggcgcgggagcgcatgcagcgctgcttggcaacttcgctgctccccaaacctctgccgctgatgatgccagtaccgccaccgccgccgccgcggcggcagcagcagcagcagaggcagctgctgtggagcagtggacggtgtgcgcccgcggcggcggaggcggcggaggcgaggggttcggctggcgccgcagccgcacgtccctgccggcgacgccgcgcgcccaccccgctgtagcggcgcagctggtgggctcgggcgtctcgctccacacagcccaggccgcaatagcggaggccggcttgcttccgtggcgctcgcagtacactccatcagcgggcgtaggccctctggaggcgcaccctatcgcggcatcagcggcagtgaccaccgcgctcaggccccccaccactacgcccaaccccacgcagcccagccagtccctgcccgcgagccagtccacacgcggcctcatcaccatgtcgccttacacaaccggacccgctggaatgagtcccgctgacctgtcggggccgtttgcgatgccgccgccgccgctggtgtcgccggcggcgtcgcggccgctgccgccgctcgggattgcctcgaccgtgtcaggcagcggcggcggcggcgcctcataccactctggactgctggcgtgcctgacgccgctgcaccgcggcggctcgcggccgcaaacactcgtcatgtctcagctggtgcaggccggtgcggcggcggcggcgcagcggaggcacagcatcggcggcgccgcgctgcgtcgcagcctcagcgccagcggccgccttgatgcggagggcgctgcagcgatggcggcagcggtcgccgctggcgcacaggcggctggcggaattgggatgtctggcgcaggcatgcgtgcaggggcgcaggtggggaccaccgcggtggccttgtgtgcgggtgcgcagcgcctttccttcaaccctccgcggcaccagtcagctatgggctactcggcatcgcaagggccagccgccaccggcacagccgcggccgtcaaacgggctatcttgtacggcggtggcactggcgctgccggcacagcagccgctgcggccgctgctatcaccgctgccaggtccgccgctggcttctccgacctctggccggcggctgcaggtcccagcagtgacgggagcctgtcctcagcccccatgagctctcagcctccggccctgctgaacgccgtgggttcctttggccgctcgcgactgggccccgggcccgccggcagcggccgcagcttcttgggcagtcaccccggcacgttcatgcccgccgccggccgatccaccagcagcggtggcgtgacgccggcttacgccgccgcggcggcggcggccgccgccgcctcctattctgtggaccaggcaggtacggtgggcccggcactgtcgccgctcttcaccattacggatgaggcggttgtcgagtacggctcagatgacgtacggcttgacggcggctcgacacgcgccgccacactcgacggcaacctccacggcaccggcaacgcgggcagtcatgcgccgagcgccgtcagcgcaagcacccgacgcagcgtcggcagcttcgcgctgctgtcggagcaccgtggcgctggcgggggcagcggcacagcaggcagttgcgcggtgctgtcgccgcctgcggtggggcggcgggcccgcggcggcggcggcggaggccgcggcagagctgcgttgctgcattcctcagcggaggagatggagggactggtgctggtgggcggtgtggagggtgacgagggtgacgatgacgaagacgcggacgcggacggtactcgtcgcgccaacagccgaaacgcacagcggccgcagcaggcacaacagggcgcggcggcggctgcggcgggcagctgcggccggcatggcagcaacaccggcagcggcgcgcttcgggacggtgcgaacggctctgggggcagctcggaaccggcggaggccaccctggcagggagcgctggcgagttcgaggagccggtcacgccgcggtctgcctacgatgcctctgctggcgccatggagtcggcgtcggtgcctatcacgcccatcccgcattccggcctgcggccccgcgctggcccttccgaggctccccagcagctgactgccgccgccgccgcctcggcttggcccccaggcgacgccgcggaggcctcgggagctgtgcaagccgaagacgctgctggcgacgggtgtgtgcgcccgaacctgctgttcccatggaccctccctccccaaccctccgacactgctacctccgcaaatgccgctgtcgccagtcccgcagccgccgtccccaaaccggtaaacacagtcgcagccgccgcggctgcggccgccttgaggggcaacagcggcgaggcgtcgctgggcgtgtcgccggcggcgccgcccgcccttgcgctggacaccctcctcagcgaggattcgctgggggcgctggggcgctttgcaaccggtgtgctttcccctcgggagctgccgtcgctgcagcacacaccggcggaggcgctggagccgccacagcagcagccgggtgcgtcgccatccatgcctgcgcctgcggcggcggcagtggcgaggatgggcagagccacgagtgacggccagcaggtgttgcagcaggtgccgagcggcggcgtgcctcgcactagccgcaccagcaccgccgcctccatcatgcgcgggcggccgtcgctgcagctgagtagctcctaccaccagcatggctcccccagcattgccttgcagacaagatctacgctgcctccatgccaacagcctgacccgcagcaggctttggaccagcagcagcagcagcaacagcagctggtgcagctgcagtccacgccactgcacaagctgggaggcattgctggcagtgctggcagcggcatcggtcgtgtgcgtggcgcggggctgaagcgcaacacaacacgcgaccgagtgcaaatgctcttcaccaacatccgacatcaggagcagcagctgctgcaaggggcaccgggccacggccccgcgcacgtgctctctccgcttggcatttccgcggcgttttcgtcggtcgtggcggacgcaacagttgggactgccgatggccgcagcagcgccgcacagcagccctggtcccccggccgcggcagccacgcggccacgagcatgggcattattgcaggcgagggccgcgtcacgtccttcaggcacagctgcggcggcatgatggggtacctacaagccggcggcctgccgcagcagcttgctgttggtgccggcggcgttggcggtggctgccgtagcatgaccaggtcgggtgcgggcgtggagggtgccgtggcggaagccgcggccgcccaagcggccttgggagctgcgccggcggctgagttttcggtgcccggtgctgcggagctgatgctggcggccggcggcggcgcgggcggcgcaatggacgtgagcggcgcgctgcctaccgtacacagcatcaccagcaacggtagcggccggaagtggcacaccgcggggaccgcagcaagccttgctagtcccgaggggccggtcgcgaatgttgcaagcgtcgccagtgtggcccacgcgccgttcgcggccccgccagcagccggaacggctcggccgtcgttctcaaagcacgccgcggcccccgcagctgcggcgcccgccgcgccgcgccggcagcgctggcaccggatgcatgcggtgctgtgcgacaccgggcagcacgagcgcctgcaccgcacggcacctggccagcagcaggcgcccggcgacgaggcggcgcaagctgtggagcagcaagcggagaaggcggctggcgcgggcaccgtcatgttcgtcacgatcacgcagatcgacgtgacggagcaggtggaggcgcaggcgcagctggccaagctgttggagcaggagcacaaggtgcgagccgcctgccgtgtgctgtgtgtggcagctggcctgtctgctatgcagcaggacggcccacacattactttgccgcgtccacctgacacacgttacgctgcccatcagcactcgtatgtgtgaacctatgcatcctgcattcctgatgcatcctgtgaactacatcaattgcaccaatcacaggtgctggagggcatctacccgcgccatgtgatcgagtactacagcgccggcggcggcaagctgattggctctggcgcggcggcctcgggccctcaaggcggcggtgccaacgtggagcgcatggcctcgctggccacgtggcacgagggcgtcaccatcctgtttgcggacattgtcggtgggtgaagtcacggcggttggaaggtagagcgccatacgtcagagcgcgggtttgctggactgtgcttggtgcggcacacggcgttgttgggcggtgctctgccctgtgtacgctcaacagtttgacaggcattccatgctgactgttgcctcgactgttgcctgcaggcttcacggccatgtgccaccatccgaccaccacgcctctgacggtcatggccttcctgaaccagctgtacaggtgggtggggtggcgggtcatatgtatatatgtgagtcgtacgcagtggcgccagttggttgggcgggatcacgggaaggaaatgatgatgtagcccagggccagtgttgcgttttgctgttggacttcctgtgcgaagccacgctggcagccatttgatgtcggtgctgattttttcttgtgtgctccgcagccgtttcgacgcgatgattgacatctacaaggtgtacaaggtggagaccattggtgactgctacatggtggcgggcgggctcgtcgcttacgatgacgacggctacaagtccgtcatctcgggtggcgaggacccgctgcatgccgtgcgcgtgatggagtttgcaaaggccatgatgcgtgccgcaagggatgtgcggatgccccataccggtgagccggtgcagatgcgcattggcctgcacagcggccccgtgaccagcggcgtcgtgggcgaccgcatgccccgcttctgcctgttcggcgacaccgtcaacaccgcgagccgcatggagtccacgtgccgcccaggcagcatccacgtctctgcgcccacccaggcgcggctgccgaacgagccgtggcgcgaccgcggcatgacggaggtgaagggcaaggggcagctgcagacatacgagtgggccggggacgtggatgcgccctatgacggcaaccagctgcagcgtgtgattggattgtatctgtaa

SEQ ID NO: 79 - DNA, 4028 bp, Chlamydomonas reinhardtii
atgacgattgaggttggcgactggctctccaagccctctaccggcgtgctaccgccttgtggcgtgttcgtcgagggcggtgagaagccgatcccggtgccgctcaagcggcgcgatgtctcagcgaccgtctacgccgctgcttccttttccgataccaaggagaccctgagctatgtgagcgacgtggagtgctcggcagtcttccgtttccccttgccgccgcgagcggccgtgtacaggtgcgtgccgcgtcagtgcagcaggccccgtatgggcccctcattgagccagcttgcattcccagtggcatggggcacatttgtttccacctttcctcctatgtacgtttatctcccgcgtaagtcatcgcttgcaacttatctaaacctgtccactgcctgccctccacacacaggttccgcgccgtgtttggagaccgcgaggtcgtgaccaaggtcaagccccgcgccgcggctcgtgaggaattcgacctggccgtgtcgcagggccactcggccgtgcacatgtcccagcacgaggcgggtgcgtccgtttttgaggtgtcgcttggcaacctggaggcgcacaccgaggtgacggtggagttcagctacctccggctgcttgacgcgttcggcggcacgctggagtggagccacaccgccacgtgggtgccgccgtacgtgggctcagcaggcgacgtggcaaccggcgtggacaaggtggcggcggcgctgcccacctttgcgcccaaggtgacctacgtcctctcctacgaggtcacggtgcgggcggaggcgggcacggtgcgtgccattgagtcgcccgagcctgtgaccgtggagcgcccagctgcggctgccgaggccgcggcaggtgctggtgcggaggaggtgtggcgcgtgcgtctgtcggagcaggtcgccgacccctccaaggacctctcgctggcgattgagctggatcccaaggccgcgcgccgcagcggcctgcgtgtgcagcgcacgcccgcctcccgcggcggcgagcagcgcactgttgcgctggccacgtttgtgccgccgctgcccagcccgcccgccgccggcgccgacggcaagcagcagctgcgcaaggagatctggtttgtggtggactgctcgggatccatggacggctctcccatcaaccaggcccgcgaggtgagtttagttcctagctgcttgcctggcattgcgtgtctgcggccacatgtgtgtgtgtgtgctttgcaccatgtcaccattgtcgtcgtgctttgtcactgtagcgccactctgctcgcccacagcccacacgccacagcccacagccggcgcatcaccattcttttcggctgcctttcccgctcctgctccccacaggccgcgctgttcttcgttcgtgacctgcccgtggacagcggcgtgcgcttcaacatgaccgtgtttggatccagccacaactcgctgtacagcaactgcaagccgtacgacagcaagaccgagaaggaggcggttgcctggatccagagcaaggtgcacgccaacctgggcggcaccgagattctgggcaccatgcagcacatctacaacaggtgagggcaaaggccgcgattatgttaatcttttgggtcgtcgcagccagtattgctgcatgggaagtggctgcaaggccagctgggttgtgcagcacagccgcatggcagcacagcagcttttctcgggctgccaggcctgcgcatatccgattctccagctcccgactgcattctccgcttccctctcaaacgccgctgccccttcttacttccccatccccgcagccccatcgcggccggctacacgcgtgagatcatcttcctcaccgacggcggcatcagcggccacgaggagcaggccgtgtacgacctggtgaaccccaaggccaaggcccccgtgcccgccgcagcccgcacccacgtcctgagcctgggcatcggccacggcgtgcaccgctctctgctggacggcatgtcgactcgctccgacggtgcggtcgtgtacgtggtggacgatgaggcgattgcggccaagaccgcattcctcaagaaggctgccacagccgctggcgccgccctgcgcccgcggctggtggcgcgcaatgcgctggtgcggcccgcgccgcacgtgctgcctcagcgcgtgtttgccggcgagcccctgcacgtgctgatggaggtggttagctctgagcctgacgcggcgctggagctgaccgcggactgggccgagccggagtcagctgccggcgcggcgccgctgactctgtcgctgccgctgggccctgcgctggcgtctgcggaggagggcgaggcgcttcctgtgctgcacgccatggcctacatcggcagcctcatggtgagtgggattgggcattggagcgtttggtttcggtaacttgggccgcactttgaccttactgacctgctttctacaacagtttgcttacaactgtatgcccctctgctgcccttaaacccaacaggccggcactagcccgctgcacgtgcggtctgacggcacgaccctggccgccccgccctctgctgacacggtcaaggaggcggtggtgcggctggcggtggccgagcacctggtcacgccgcacaccagcgccgtgggcgtgtcgctgcgccgcgaccccgctgcccccgaggccgctgccaacgtcgtggaggtgccgctgcagctaccacacggccgcaagctgtggggcaccgcctccggcgctgggcccatgccgccgcccatggctgtctgctttgccgcgccgcccatggcgcagcgtggaggcaggatggcatgcatgagcgcgtcggcgatggcgtgtgcgccgatgatggcgtgctcggcggcgccggcggcgccgccctgccccgtgccgcaaatggcgtcgccacagatgatgtggtgcggcactgcgccgggcggtggcggcggccgcggctctgcggctccggctgcgaccaaccaggcgtttgcgtctgcggatctgagcctacgtggcgagaagattggtgagttttcgacagcgatccaatgccgtagcctgctgcgccggccttagcatgcaaatgtgcatctgttgctaggtgtgttcgtatgggggttgttcatgtgtcctataccatttttggtgctgacattcgtgctgctgcctcgccttgtaaccttccacttgcagaggcgctgtccgacttgagctgcggcgtgcagcaggaggcccagtgcttcacgaagaaggcgctgaagaagaagtctgccgccgccagcctgggcgacgccgtcggcggcgccatgggctcgctctttggcggcctgttcggcagcggcagccgcggcgcctccgccgtgtgcgccaagccggcgcagcaggcgctgcagggccctggcagcgcaggcggcagctgtgtcgctgccgagttcgccgccccttgcggtgctgcggcgccggaggcggagcaggaggagtcgtgctgcgacgacggcgcggatgagatggaggccggcgactgcgacgctggctttagcgtgccggcgatgaaggagtcagtggcgcggcgctcgcgctcctgctccgcgtcgccgccggccgctgccgcggcgccggcggagcgccagctgcgtggctccgagctcctggctttcctgaacctcaagcgcaccacgcagggctactgggccgccggccccgagctggcggcggcgctgggcgtgccggttgtggacctgacatccgctgcgggtgctgccggcagcggcggcagcaccgcagcagtgctgcgccccgccggtctgaccgacgacgcctgggcgactgtggtcgtgctggctgtgctgcggcgctgcctggcggctcagcgggaggtgtgggcggacatggaggccaaggcgctggcatggctggcggcggcatggccggagggcggccgcagcgtgggaagcaccgtcatggctctggcaaaggcgctgacggtggaggcttga

SEQ ID NO: 80 - DNA, 834 bp, Chlamydomonas reinhardtii
atggcggaggctaactcgcgcgagctcgcgctttacagcgccaagattgctgagcagtctgagcgttaccaggacatggttgaggagatgaagaaggttgctgtgctggctaatgagcaggagctgtcggtggaggagcgcaacctgctctcggtctcctacaagaaccttgtgggctcccgccgcgctagctggcgcattctgcagagcattgagcagtcggagcaagctaagggcaacgagaagcgcgtgggcatgatcaagaggtaccgcgcggtggtggagggcgagctcgacaaaatctgccatgagatcctggacctgctcgacaagtacctggtgcccagcgcctctaccaccgaggccgctgtcttctacctgaagatgaaggccgattaccaccgctacctgtctgagtacaagacggacgaggccaaagcggcggccgcggagttgacgctggccgcctacaaggtcgcccaggagaaggccgacgagctgcccacgaccaaccccatcaggtacacaaggtttggggccggagcgcgcgcctggagcggcatgcatgcaagtttctgaccttgtttcggtgccgaatgtcgcgaatgcaggctgggtctggcgctcaacttctcggtcttctactacgaggtgatgaaccagcccgcgctggcctgctcgctggcgaagaaggccttcgatgaggctatctctgacctggactcgctcggcgaggattcctacaaggacagcgcgctcattatgcagctgctgcgggacaacctcaccctgtggacgtcagaaatgcaggacgacgacaagaatcgggcatga

SEQ ID NO: 81 - DNA, 8116 bp, Chlamydomonas reinhardtii
atgccttcggccgctaccaagaagaaggagctggagaagaagaagagcggcaagctttcgaagtcgcaggtgcgaccacaatgggcttgtttgtgcgtggaggaagagctcgggaagggcgctcagtcagggcggccgcccaggtccaacggcgcttcgccgtcagggcatgtcgtggtgttggcgttcgcgcagattgaatctatgctaaatttcgactagattggcctatgctctggcgagccgggccgtctctgacggggcgatgcctttggcggggtttgatggtcagccccctcaacaactcactgactcaagtgctctggggacgcacaagtgcttcaattaggtatcgtatactagattagctggaccgccaggctcgcccaggtggcagagcgcttttcagccgcgggtggcagcgctaaggccatgagcgcttttaaggcacctgcagcgccggcagcgagctgaatcgcgcacctcgcctttcgacctcggccaatcattactactcgaagaaacctacgcctcttacgccgacaccttgcggacggcccagctggccgttgtggcgccattgcgcggccggtctcccacgcgtttcacccccaaggctggcgcctccctcctccgcttctcgcagcccccgtccagagtcaggcagatcagttcaacccatgcagctctaagatccctcccaccacctatcctcgcgcaccgcccttcgtcttcacacgcgcctaacccgcagccccctccctccctcccaaccctccctcttacaaactcagagcacggcctcgatgccgcatgccgactccactgcctctctggcgtccaagggcggccccgtcgaggatgacgccttcaggtaagagctccgagctccagctttttattgccaccgccgccgtcctgtcttggatgaggcaacccccgtgatgtttgccttgctttcggagttggcttgtgacgacccattccgcgctacccgcgcccacacacgcccccgccctgcgttcccctgcctccctcgacagctcccgcaccgtgaccggcgtgctgagctcgcggcccaccgcacgcgacatcaagatcgacggcttcagcatgggcctcaacggctgcgagctgatccaggtgtgtgtacgtgcgtgtgtgtgttcttgggggtgggggtaaactctgaaccaattccgtaagggaacagtcgcgctgcacggagaagctgcagcggcatgtgcgtgtgtggggattcgagactgtgcagtgcagctgttcaggggcggggcggcttgtgtagctaggagcagcccgggtgcgggactgcggcacatgtgttgcggctgttagcgccgcggactccatgcggtctttgtgtactgtatgcattgactgcttcctgatggccatgctgtgggtcaactcactggcacaccgcacgcgcaccgcacggcaccacacctctgctgcactcacaccacaccacttcattcgccgccaccacctaacactcacccgccctgccctgcatcacaccacaccacacacaaacatgcaggactgctccatcgagctgaccatcggccgccgctacggtctgattggccagaacggttccggcaagtccaacttcctcaagtgcatcgccaagcgcgaggtgagagattggaactggcgaggagagagccgtcgggcgccgttacgggccgtgctgggctgtgctggggcggggacgcagagcaacgctcggcagccaggcccttgacacgttgatcccagcccacccatacccaaatccacccaaccgttttcctccccaaccgccccagcctcttcttgggccaaccttgcgtgtaacccgtcacctctccccgctctcaccccaccctgccccgtgagatgctctaccgtccatggctttcttcaccggtcatgaatgtaacccgatcccatccctttcacccctcactcccctcccctccccgcccccccaggtgcccatccccgaccacctggacatctaccacctggaccaggaggccgagccctcggagcgcaccgcactgcaggccgtcatcgaccacatccaggtgaggggggacgagggagagggaagcgagagggagggggagaagagagggaagagagtgaggggaagagagtgagggggagagggaagggagataagaggggagagacaagggagagagagagagagttgtgtgtgtatgggtgtttgggtgcgattgttttgggtgtgggggcgtgtcctaccgggtccgcggagggggggggggcgggaggtgtacgcatgtgccggacacgccggctagcagcagccgacacggagcctagaccgcgacagacacgcacgctggagcgcgaggcccaacgcgtcccatgtgcgccgcgcgtagccaaatgtgtatgcatgtgttgtgaacgtgcctcgcgtgtgtataaccaagcgtgtgtgtgctatgtgtgaatatgcctcgcttgttgtgcggcaggctgagctggagcggctgcacgccctggaggaggagattatgtccactaccggccccgaggacgagcgcctggaggtgagggggaggcagggagggggggagggagggagggagggagggagggagatgggtggggcctaggaggagagaagaggagaggagcggagggctgcgagaggttgggcccgtgggaacagggctggtggcagggccgggggcggcacagactggcatgggcgggaggggtggtgcttggatgggttcagaggggcaggagggcttggggagaaggttggcgtggcacaggagagagggccgggggggggggcacaggaggatggaaagggggagggcgctgcgggggaggctgcgggggaggcagggctggtggaaggcacacaaggaggtgtcagatgcatgcgggtggtgaggatgcggggcaggacagggcaagtgcggattcgggaggcaggcaggcgtgggcgcggttgtgttgtgtatgccggttcgagagggtagacaacaagcaatacttacatgtgcacacgcatgcatgcatttgcacacgcatgagtgcattgccgattgatgaccaaatccattagatgacgaatcggagcgggatagccgttgaaagcgccgcacaacttgacgacaaaacgaggcatttgtctgacggcacgaccagaaactcaatgaaggtctgcacggtgggcgcatacacatgcatttgcacacgcatgagtgcattgccgactgatgaccaaatccattagatgacgaatcggagcgggatagccgttgaaagcgccgcacaacttgacgacaaaacgaggcatttgtctgacggcacgaccagaaactcaatgaacgcttgcacggtgggcgcatacacgtgcatataccgtactctcgccgattgatgatcaaatccattagatgacgaatcggagcgggatagccgttgaaagcgccgcacaacttgacgacaaaacgaggcatttgtctgacggcagagagtggggtccagaactccagatcaaaagcttgcacggggcacggcacaagccaggcgggcagaatgggggtggggctgccgccgggcagttggggccaggcggcgagggcctgtgtgtatgtgtgcatgggctgcaggcacgatgcgtgtcaacgccgtcaactcggccggccacacgtagccatgcacacacacacacacacacacacacacacacacacacacacacacacacacacacacactcactcactcactcactctgcaccaccgcaatccgtcctcgtcaacccaacaccagagcgcctatttttcaccactctcctcacccaccaccgccaccaccacaccgccaccacaccgccaccaccacccacgcccacgcacaggccatctacgaccgcatcgacgagctggaccccgccacctttgagagccgcgccgccgagctgctgcacggcctgggcttcagccccgccttccagcagcgcctgaccaaggacctgtcgggtgagggcggagggcagggcggaaggagatggggtggaggggttggggcggagggtttgggagggggtttggagggagggagggggaggagaggggctggagagggcgggtggagggagggcgcagcgctggtccggttggagtatgctcctccaccgatcggtcgtactattgccgcaccttgctctgccgccagcaccttgccccgagtccggccccacgctcccacgaacacgctcccacgaacatgctcccacgaacacgctcccacgaacacgctccttgtgctaattttaacacaggtggctggcgtatgcgtgtggcgctggcccgcgccctgttcgctgcccccacgctgctgctgctggacgagcccaccaaccatctggacctggaggcgtgcgtgtggctggaggagtacctgaagaactacaacaagtgcctggtcgtcatctcgcactcgcaggtgggctggcggctgcagctggcagtgtgcgcttgggagcggctgggggccgcgtgcgggtgggggctgtgtgcggcttggggctgaggttttgtgtgtggcaggggtagagggagggaggcaggcaggcaggcaggcagatgggacaaggccgaacaccttgatccagggtaatggctgcctgcagtgatggctgccgaactacatgaagtctaatggcctaacctgacgcctgacgaccgcacctggcgcttgcgcacccactcacaggacttcctgaacggcgtgtgcacgcacattatctggctcacccacaacaagctgacgtactacaccggtgcgtactgtgggctggtatgaaagggggctggtttgcagggggtgggtttcatgaccgggggggcgttgggaaggcagggaggagctgtacggcagtactccgcgcgctgctgctgctgttgcgtgcgtgtgtgtgtgtgtgtgtgtgtgtgtgtgtgtgtgtgtgtgtgtgtgtgtgtgtgtgtgtgtgtgagtgagtgagtgtgtgtgagtgtgtgtgagtgtgtgtgtgtgtgggtgtgggtgtgggtgtgtgtgtgtgtgcgttagttttgcacccaacttttctgacacgctcctcctgaagacatgcaatcccttctcccatctcccataccctgcgccacacgccacaggtaactacgacacctttgtcaagacggtggctgagaacgaggtggtgcagatgaagaagtaccagaaggagcaggaggacatcaagcacattaaggagttcatcgccagctgcggtgagcaggacgcagcagcgagggagggaggaacagagggaggcgtggaggcgccacttcagcacttgaccgaccctacacgcacaggccgtgtcgggttactcccagttccatgcgacccaaatgcggcccgtcaggctggtgattcaagccgccaccttcccggcttgacctacccatcctccccgcctccccacctcgcccacccgccccgcctcgcccatccacccccacaggtacctacgccaacctggtgaagcaggccaagtccaagcagaagatcctggacaagatggaggaggccggactcaccaagcccgtgcagcgcgagcgcaccttccaggtgcgtgcgggggcgtgtgatacttctttcggtgctgattctgctgaattgcaacggcactgactcgcggggtttttgtgtatgtgcgttgcgtgcacattgacgccaacgggactcgaaaacgctttcggcatccatgactgacctgccctctccttccttccttcccatcttcctcgtcgcagttctcgttccccgagtgctccaagctgcctcccccggtgctgccgttcatcaacgtgtcgttcgcttacagtggcaagcccgaggagtacctgtacaaggtgaggggggtggagggcgggtggggggctgggtggggtggtggggagttgtgtatggggtgtggggcggtcacgtggcatgtgggggccgggggagatgtggacagagggtgtagtgtgtgtgtgtgtgtgtgccgtgcgcatggctacatgtccccgccgggtctcacccgccaccccacacaaatctcacgtgtttcttatgaacctcgcacgcgcgcgcccgcacaggacctggagttcggcattgactgcgactcgcgtgtggcgctggtgggacccaacggcgcgggtgaggcagggaggcagcagggggcaggcagggaggcaggcagggccgagcgcatgtgaggagttgcgggcaattgccaggcaggggcgcacgcatgtgagggattggagtgaggggagggcgggcaagggtagcggctgcctgtgtgggtctgtgggaagtgccgtagtagaagtaaggccggcggcggcgaccgctgcttggtgctgacgactccgcatcggcccccacccccacgaggtgctatactattgttcctggctacgccttcacaatttttaagtaatcatgagtgtgaaccccacctcccccacccccacgcctcaccccgtgcaggcaagtccacgctgctcaagctgatgaccggcgacctgacgccctcggtcggcaccgtgacgcgccacccccacctgtccatcggccgctaccaccagcactcggtgcgtgcctgacttcagaattgtgtgtgattggacagctgcatcacacacagcagccgtgctttgctgcctagctcttctgacaatgtgtgctttcagttttgcgtctcgtgccccgagggttgaacccgttagttgctgtggcccaactacaatacccggctgacgaatgtcgtgtgtgcactctcgcccctccccctccccctcccaaacgcccacaggtggaccagctggacgaggagaagactgtgctggagttcttcaagtccatgtaccccaacacacgtgagaagccatgcatcattttcattgcggtaccagctcgtttcgctcggtcgcggtgcaccgcacgcatgcactgccaagagatgtataccgacgttgtcacaaactttacaatgtccgagtccgcaacccaccaaaccttgactaatcatgattgtaaccaccaccaccgccaccactacccgctctgcttgcagccaccttcaagcgcgaggaggacgagtggcgtggctacgtgggccgcttcggcatcagcggccgcctgcagaccaccaagatcggcatgctgtcggagggccagaagtcgcgactggtgttcgccatgatgtgcatgaaggtgaggcgaaggggtgtggggtggatggagagtgagaaggacagggcgtgcagtgtgactgtttccggaatttaaaattgtccgtaacgcatgaaacgggcaggattggatgcccggacgcggcggctcacaggcttgggcgggagccgtctcgaggcgacccaccgcctgctcactttgtcccccgcctccccgctcccaactgctcctcttccccatctccttcctaccctccgccccgttcagaacaacaacctgctgctgctggacgagcccaccaaccatctggacattgaggccattgactcgctggccgacgccatcaagcgctacgacggaggaatggtgctggtcagtcacgacttccgcctcatcgaccaggtggccaaggagatctgggtgtgcgaggacaagaaggtgaggagggcggacgtggagggagggagggagggattgggagggctgggagggatgaggaagggctaggagggaggagggagggctaggagggagagggggctgaatgcacggagcacaagcccgaccgaggcgggggcggcagctgggggagggcggaggacgggcggcgagggaggggggcgcacacaccaacattgaggctccaacaccggccagttagaacaactctgacagggggctaccacattacaccttacacacgcaacaaaactaaatcgccccgctaccaatccttgcaacccccaggtgacgatgtggaagggcgacattcgcgactataaggcgctgctggccaagaagatgggcctcagcggcgtgcccggcaagaagtaa

SEQ ID NO: 82 - DNA, 4902 bp, Chlamydomonas reinhardtii
atgggtaagcgcacagccacagcgcatggtcagcgcgcgcgtgcgccggtcctcacgtgcgcttcgcttacttttgcgcaggcaatgagggcgaggttaaggtggcggtcaacgggacctctattgaggaggtcaactttgagaagattgatctgaaggaggcgctgtcaattctgaacgtaagtcggacgccgccgcgaagaaacgcatcgtcgcccagtcgctcttattaacgcgaacccatttatcgcgcagacgacgcctcatggactatcctccgcggaggcagacaagcgccttgcggagtatgggccgaaccgcctgccggagagcaagcgcattccgctcctggtgttcctcggctacatgtggaaccctctttcgtgggctatggaggccgcggccattatcgctattgctctgctggattacgctgatttcgccctcatcgtgggcctgctgttcctcaacgccgtgatcagctacgtcgaggagtcgagtgcggacaatgcaatcaaggtaagcttgtgtgctgcagtccttgtccagcgaaagacgtgtaacctcactgcaccgcgtggtgcatcaggctgttaacgttggtggctattacccccgcgcaggcgctggcgggagcactggcacccaagtgcaaagtcattcgagacggcacgctacaaaccatggaggcggtcaaccttgtccccggcgacgttgtggtcatgaagtttggtgacatcgtggccgctgacgtgaagctcttctccgacgacccgcagcatccgttcgattcacactctgaggaggtgcccatgcaggtgcgcatgtgcagcaaccattcgtgtcgccagcacagttcgtatagcccgtacctcgctcaacgccatcccttcccgcttcccttcccgcttcccttcgtcatgtgttgttactcactcttggggcttgctttcaattcacagattgaccaggccgccctgaccggtgagtcgctgcccgccaagaagcacaccggtgacgtcgccttctctggctctgccatcaaggctggcgagcgccacgccgtcgtgtacgccaccggcatcaacaccttcttcggcaggtgcgcaacacctggaagcatggtccagctagccttctcaacccctccgtatcacagtttcctcaagccttctcgattgttcgcaccaataccctgaaacgaacgctaacacccgatccgctgccggctttctcacgtgcagggctgctgcgctgatcagcggcacgcacaacgtcgccaacctgcagatcatcatgaccaagatcggaggcgtgtgcctggtgaccatcggtgtctgggtggtgattgagctggccgtgcagttcggccactacggccacggctgcacttccggcgagggtgagtgcaacggatgcggtctggacgcgcaagttatgcctgtacttgcacggggttggccgcaattagagtagacgcacaggtaccaagcgacaagccctaggcaggctcattggcacgcttccagctcacggtctgacgtctcccgtatcttgccacctccgcccgcgccgcgcagagggctgccccaccctgaccaacatgctggtgatcctggtcggtggtatccccattgccatgcccaccgtgctgtccgtcaccctggctctgggcgctgccaagctggccaaggagggcgccattgtggcccgcatgagcgctgtggaggagatggccggtatggacattctgtgctcggacaagaccggtgagtggggccggcggagtgaaggcgggcgggctgggcggtgcggatggcaccgggctgggtggacctgggcaggagtaccgaggtaaggcaagtcaaaagtggtgggactgggcacaaagctggtatagcttagcttgcctgcgcgcgctcacccgcttctcccttgccaacactgccgcaccgttcaggcacccttacgctgaacaaactgtcgatcgacatgaacaccatctacaagtgcgagcccggtatcaccaacgacgacgtggccaagtacggcgcgctgtcggccgacgttgccggcgaggagcccatcgacatggtgctcttcaacaactacgccaacgccaaggacctggccgcccgttacaagaagatcaagtgggtgcccttcaaccccaccgacaagttcaccgccatcacgctcatggaccaggagaccggccgcgtcttccgcctgctcaagggctcgccccaggtgcgccggccgtggctttggggtcggtgtggaaatcaggacgctgtatggcgatgtcgcggcagggcaaggcgggcgtgtgagttgcagtccggcgataatgccggggctggtggtatgtagccccaaaactgctgtacctgaaagcgccagtttctcacgctctacgcctcgccctgccgcgccacacacaggtggttctgggcaaggcgtacaacaaggacactctggccgacaacgtgaacgccaagatggtggagttcgccaaccgcggcttccgctccctgggtgtggccatggccgagggcgatggcgctgacggcaagcacgagtggcacatgctggcgctgctgcccctgttcgacccgccccgccacgacaccaaggacaccatcgagtactgccacggccagggcattgaggtgaagatggtgactggcgaccacctgctgatcggcaaggagaccgccaagatgctgggcatgggcaccgtcatgtacccctcggaggtcctgatcaaggtgcgcgtttgctctggggaatgggagctcatgggagacggcgcggtcttgggaaagggtgcgggctagaaagcgttggaagcggcaaaagtcagggagttgaagggcagacaaccagcaagctcagtggggcaagggctgcagatgtatcgtatcagtacaggagtctgaccgttcaggctgcgcgtcttgttcgctcgctgcaggccaagaacggcgacaagggcgccctgggcgacttccgcgacgtgacccacatggtggagtcgtgcaacggctttgctgaggtgttccccgagcacaagtacgagatcgtggccatcctgcaggtgtggaaggctcgcaagagggtggggggaggcgaggcgaggcgaactgggcgcgggggtatggcgaagccctgtggaggcgggtgaaggcgaggcaaagggaaacggaccgtaaagggggcaagagcaccaacgggttcggcaaatggtgaaggaaggaatcggcgagtaggtcaataaggggcgccgggggagtggaagggctacagaccagagccgtcgcaggcggcaggatcagagtagggagctcaggcgcaggcggatctccgggcgtgtgctttctgggtcgtcgctctcggtcaggttctgacctgccatccttctcctcccgttgccaccaacaggaggccgaccacgtcgtgggcatgaccggcgacggtgtgaacgacgcgcctgcgctgaagaaggccgatgtgggtatcgctgtggccggcgccactgatgccgcccgcggtgccgccgacatcgtgctgaccgaggcgggcctgtccgccatcaagaccgccgtgctgggcgcgcgcaagatcttccagcgcatgaccacctactccaagtacacggtggccatgaccttccgtatctgcttcacctttggcctgctgaccgtcatctacgactggtacttccccaccattctgattgtgatcatggccgtgttcaacgacggcgccatgattgcgctggccaaggaccgcgtggagcccagccgccagcccaacgcctggaacctgaagaacatcttcctgatgggcattgtgtacggcctgtacctcaccctgtccacctgggcgctgtaccagaccgcctgcaagaccagcttcttcgaggaccacttccccatcttctcgctggacgaccgccacatcaccctgcagaactggtgcaccggctacatcaccaaccagctgaacctcaacccgaccgccagcatctgcaccatgcccacctacctggcgcagttcgacagccaggcggcttgcattgaggagatgggcggcgagcagatcatcaaccagtgcatggccgagcagcgctacatccgcggcgccatgctgcgctcgctgatctacaaccacgtctccatctccggccaggcgctggtgctggtggtgcgcaaccagggcttctccctcatggagcgcgccggcagcctgacctacatcgccttcgtgctggcccagatcggctccaccgtcatctcggtcttcggcttcggcggctacgtgccccctcgccaccgcttcaccgactgccagttctgcagctactctgactacacccccgtcaagttcttccccagcaaggaggtgcccatggccggcaccgagtcggtgtacacggcctccgtgctgggctgcctgggctacgtgctggtggcctggatctggacgggcatctggtacgtgctgctggaccccatcaagtgggcgctgtgctggatgctcaacgaggacggcttccgcgacatggccaccatgaagcacgagcgccgccaggagctgggccgcacctcgcagcagaaggccgccgacgtgggcgtgaccggcatgaccgtgcccaccgcctccaacccgctgggccgcgcctcgatccagaagcccgtcaccatggtgctggaccgcgcctcggccgccctggtgcccgtgcaccgcaccagcgacggcctggtgcgcgtgtcggccgaccccgccaaggcccgcgacctggcgcgccgcagccgcctgaacgagggcatgcagcgcaccagcggcggcgcgcacgctgccggccacaccggccagaaggagatcacgcgcgcttaa

SEQ ID NO: 83 - DNA, 5276 bp, Chlamydomonas reinhardtii
  misc_feature (1573)..(1672): n is a, c, g, or t
atgaaggatgttgccaacaaggaccatatcagcagggtcgaggtgaccatgaaaaaccatatcagcaggttcgaggagaccatgaaggaccatatcagcagggtcgaggcgaccatggagggccatatcagcagggtcgaggagaccatgaagacgggctttgtggagcagcagaagttcttcgtgctgctggcgctcgcgtttccggtgctggttgcaatcttcctggccctgatatttggggctatcacgcagtttcccgtggaccccagcagcgtagttggactgctgatttccaagaatgcatagttccggtgagattggagaggggggagggagggagggagaggaggcaggggagggagggaggggagggagggatggtgagggagggggcatgggaggggacatagccgcggtggcaaaggcgtggcggcttgcaccgactgaactgccgctaccgtatcctgggctccttgtgccgcggccccacaaaccctgctgctgccgatgctgtccgttcacaaccaagaatacttagctccggtgagtttggagatggggtgcgtgggccgagactccggtggagggcagggcccatgaaatgggtggggtttgtgtgggggtgtgggtttgtgtgtgggtgtgggtgtggggagttgtgggtttgtgtgtggggggtggggggtgtggggtggggggggtgggggggtgttgtatataccagcccaaactaaacccaaaccaacgaaaactggagtgcaggcagaggcgttagttgcgagcgataatacttatgggttgtgggccgaggcgtcgcggagcagcagggcgagcggcgccggcgataaatgtcgccgcccgggctcggtgacgcgcacaacagcacaagacaggcacgcggacgcgacaagcaaaacccacgacttacctggcgaccaggaaagcagccccgacgccaggcagggagcttcgggccaggagcacgacatgtgggaaaagggcaaggcaaaaatcggaagggcagggcacagtgaaagggccgaggcgtgtcggcagtaggataaagaagggataacaaagacaaggctacacacaagcccaggcggcgaaagaggcagagagggtgtgaggcacgggttaagaggtagatgtgggtggcatggggaccggtcaggggagagatgaaggggtgctgggcagtgggggtggatgggtgtggggaaagctggtagaatggggtgacagccatggggaactgcctgatgtagttgctatggactgcgggcatggctgcagtggcacctgcttggggctaatgcgcacacctcgagaccaattctgggtgtaacggaaacacccgacgcccatgacagcaccgccatcaacacccgctgacccgcacccccacctacgccttcacttcttaaagaatcatgaatgtaacccccactcccactacctgcgcacctgcatacacaggtcatggctcagatcatgggcgctgtagcggcgctgatgcgggtgcagttcgtgagcggcacacacgccatcgcctcggcgctgtactccnnnnnnnnnnnnnnnnnnnnnnnnnnnnnnnnnnnnnnnnnnnnnnnnnnnnnnnnnnnnnnnnnnnnnnnnnnnnnnnnnnnnnnnnnnnnnnnnnnnntggtggcgccagctggtggcgccagctgccagcggcgcgtcccgtcattacagcccaccctttatcccgcataccgatcccgtgcccagctgccagcggcgcgtcccgtcattacagcccaccctttatcctcggcctcgctgcacggcctcgagggcgagggccggtgtgggttgccaccagtgcttcatgggcacgcagcgttgcatagggggtcgcgcattagcgctgtgacgttgcggggggtctgcaaggctgatagctgataactggatggggcatgccgcggcccatgtcccagcttgaccattcggagcttaaacagcgctggcaccgtgcatgaatgggccttgcatgcgcatgttcgtggacctgagggatggcatggacataagggatgtgggcggccctggtttttgacacactggagtcaggaggcacatgagaaatgaataaagacaagtgcaacccggtctcaccggggcgtgcccattcacgcggcaccgtccaaagcccaaaccatcctaaatgcctttacagggcatactgtatgttatgaataagtggaagtggcgacctgcctgctcgccgagggcagtgggcggaattttggactaggaatctgagacgacaggcgtgtgtggggggggagggggagatcggtaaggtcagaatctagtcggacttttcccccgaccagttttgtggggttgaagtgactgcaactttggacggtgcgcgcagcgcaggtgagaccgggttggacgagatcatctagacaagacgggtcatctacgctacgtagacgccgcggcgggcctgaaggcatcttcatggtaggggcattggcagaattcacatagttatcagtactaccatactattgaatggagggcagaggacggcgccctgtaagtgcagtaggttgatcggtcgatccatgcacgcgcccggaagcgcgacagtaccagcaccagtggaggcgcgggccgccatagcaaccgccacgtacaccacggtcgcttgatcatctccaagcgcacgggtcagcgtcgtggccgggtccgggtcggggtcagggtccagatcgtcagaggagctgaagttagaagtgaggtgatagtagaattgaagcgcgttggttgtcggttacagtaggcttatgcaaatgcatgttacccggcgtgcctcgacgtgccccgcgcccgtgcccacagatttggcctccgtacaccggcggccgcgacgcgggctgcggccgcgttgtgtctcctgccctgcgtacgcagcagctaggcggcagcgctggtggggcactgtggcacggacgccgctggtcacgccgcatgtgcagggcggctagcgacgtgagctgggcgtatgctgcagccggggacgacgaggacgacgcggaggcgggcgaggtaggaagccgactgagggaggcgcgttgcgatcaggggactagggttttgtgcgatttggaccgattgcttgacggaggaactgcaaggcggcaacaggccagaacccgaataattgaagggccagactagcactgatcgccgcgtgaggcgcttttttgggttcggcatgtaacggtgacgcagcgaatggagctctcggacggcttaaaacgcactgccgatagcaaggcggaggagcgatggcactcaacgtataatatcatcgattcactggcgagatgcgcgagcctcggagcgcaagcaagcaaatggtgcggattcgcgggaacggaatggcgactcccgcggacgcccggaactctaaataagacggctgagtccttgacgcgcgtgatactatcggcttcactctaatacgtttgtccgtctgtccgccgctgacgtgtcacccactcaccccggaccttcctgcggcacccccgcacaggctcccgcccgcctgcactctcgcctctccggcaaaacccccgctggcgccgaccgacgctgcgctgccaccgccgtcgcccgcacccgcacccgcggccctccaccccaccgacccgcgcaacaagaccgagcgcttccgcctggtgctgcaacagcccgccgccttcatgacgccggagcttcgggaccagctgcggcagcgcgtgctcgtcatcgtgcgcggctacctgtcctcgctgtaccgggcctgcctgggcgcctacctggaccaccaggtgagcgccctcactgtcataagctgctgcgggagtcacaaggagtcaggggcctgagagactctgacctgcacagctgcactgcagtcgtgcagtctgcaccaccttgcccgccgtcgttatctccggctatctaggccgcccctagacacggtagcccccagcatgcgctgtaatgcatggactgccgtactgcggtagcgctgccgcctcttccccactccttacttgccacgacccgcagcgtgccgccacccgcactactcccgccgcaggccgccgccgcccaggcgctgggcatgcgagtgctggtcggcaacatctgctgctgcagcacctccgcccgcaacagcgcatcgctggcggcccagatcgccgcacacaccgccccacacgaccgagtcatcatcctggcacacagccacggcaccctggccgccctggacctgctgtgcaacccggcccacgccgccgtgtcgcaacgcgtggagtgcttcctcccccttaacggcgtgttcggcggcacgcccatggcagacctgtgcaccagctcgagcctggtgagtgcggtgctggaggcgacctggggccggctgctggcggtggtgggcggcggcgaggcgggcgtgctgcgcgacatgacggcggcggcgcgccgcgcatatcacgcgcaacacggcgatcgcatcgcggcggtgctgcggcgcgtggcggtggtggcgctggcgtcgcactaccgctggccccggtggccgccgccgcggctgctgcgggttgctgctgtggaggcggctgtgggtgtggccctgctgccgcagcgcatggtgatggacgcgatgggctgggcgcccaatgacggctgcgtgccgctggccagccaggtgcgtgcgggggcacatgcatgcgtgcatgcagctagcggcgtacacacacgatcaccggaagccttgctaccgacttctgcacgtgccacacgccacgcagtcacaacccatgggtggcgctttgccgtctgctctggtctgcttagcccgctgccttcactgctgcattacactgtcatcccaacatcgacttgcctgcccacacgtgcagctgctgccgggcgcggcctacgtggtgtgtgagggcctgcaccacgtgcacaccgtggacgacctgggtgcgctggacctccgggcgttcacacacacgctgctggtgctggcgtcggaggcgcggctggcgctgatgaaggagcagggagaggaggtacaggggcaggcggagcgggagcgggaggagaaggaggcggagggtggaggtggaggcaaaggtggtggtggaggtggaggggcggcggcggtgcaccggcatgaggaggaagtggcgcggcgcctgctagcgcccggtggcgccggaggtggagattaa

SEQ ID NO: 84 - DNA, 5004 bp, Chlamydomonas reinhardtii
  misc_feature (1)..(51): 5' UTR
  misc_feature (3648)..(5004): 3' UTR
gctgccgaggtgggtgacggcagggaaagggtgttcctttttatcccatccatgttcgagcccacagctgcgccatcgccgaagtcggcttcggccgcctccagcagccccgcagcttcctccagctcgtcctcctcctcgaccacctcccggccgcggccgaagaagaacaccgtgtcgggcagcaccaccaccggccggaccagcagcagcagcagcagcaacaccagcagcggcaatggcagcggcggcggcgggggcttcaacttcggggctgtgggcgccacagtgctgggcggcattggagccttcctggggctgcagcagttcggcaagacgtcggactcctccaaggctgcggctctggcccaggctgtggagcggctgggtgagaagctggaggacaaggagaaggagaaggaggaggtcaaggcggtgctgcagagccaggtggaggagctgaaggaggagaaggaggcggtgatgcaggcggccaagtcgcgcgaggacgagcttcaggcggtggcggtggagagccaggcggtggcgcagcagctggagagcgaggtggcggcggcgcgggcggccatccaggacaaggagcgcaagatgctggagctggagaagcagatcgccaagatgaagcagcagatctcaatcggcaaggaccagctgctggccacaaaggacatgaaggaggccactgcgctcatgacggacctggcgcccaaggaggtcatgctgcgggagctggaggcgcaggtggcgctgctgactgtggaggccaaggaggcgcgcatgctgctgggcgagcgcgaggccaaggtggcggcgctggaggggcaggtggcgtccatgcagtccattgtgcagtacagcaagcaggagctcagcctgcgcgcgcgggacgccgcggagctgacgcaggtgaagcaggagctgatgaccaaggagcagaaggtccgagagatgaagcagctgcttgcggagctgcagatgcagcagcagtccagccggctggagatggagtccatgcgcgaggagctggacagcgcccggtccattgccggcgagctggagaagcgcaacgcctcgctcatgcgcatgacgcagcagagcctgggccgcgagggcgacctcaagcaggcggtcaacagcaccaaggcccaggtggccaagctggagtcggcggtcaacaccgccagccagcagctgcagcagcgggcgcagcagctggcgtccgtcaaggcctcgctggacgagcagacggcggaggtggcggcgcggcaggaggcgctggaggcgcgcgaggcggcgctggcggcggcccggcagcaggcggaggagctggaggccaagaacacggtgctggtgcgcagccgcagtgtggagctgggcaagatgcaggacctcaagcaggcgctcaacgccacccgggcgcaggtgaccacgctggagaagcaggtgaaggaggccaacgtggcgctggccgtcaagtccgccaagctgcgcgagctggaggtgcaggttccggcgctgcagaaggagctggccaccggcaagcaggctctggaggcctcgcgcgccgagctgctggctgcccgcagcgccgcctccgacctggaggccaagaacacggcgctcatccggcaggccaccgccagcctgagccgcgagggcgacctcaagcaggcgctcaacatcagccgcgccgagtccgccaagctggacgacgagctgaagaaggccaaggccggcctggccgccgccagcacctcggcctcggaggccaaccagcgcctcaccgtggcggaggccaaggtgcgcgagacggagacgcagaaggcggcgctggtgcgcgacgcgcagatggccctgtcgcgcgccagcgacctgaagcaggcgctcaacgtgttcaaggagaagagcgccaagctggacggcgagctcaagagcgcgcgcacgcagctggccgccgccaccagccaggcccaggccgccaaccggcagtggcaggacgcggagaacgcgctgcgtgaggcggagcagcagcgcgagaagctggtgaagacggcgcaggtagcgatcaccaagtccacggacctcaagcaggcgctcaacgccaccaagcagcaggccaccaagctggagacggaggtcaagcaggtgcgcggccagctggaggcggtgggcggccgcgcggcggaggcggagaagaagctgaccagcaccagctcgcagctggaggcggcgcgggcggagcgcgagaagctggtcaaggaggcgtcttccgcaatcaccaaggccactgacctgcgccaggagctgaatgccacccgtcagagcgccaagcagctgaacacggagctgtcccgcgcgcgcgagcagcagcagcaggcggcgcaggcggcggccgccagcagccagcagctggcctccacgcgctccgagctgagcagcaccgcggaggcgctggcggcggagcaggcgcgcgtggagaagctgagcgagcagcgggcgctggcgctgcgggagagcaaccagatgaagacggcgctggagtccaccaagcgccaggcgacgcggctggaggcggaggtgaaggccacccgctcccagctcaaggcggcggagcaggaggcgcgcgaggcggaggagcagctgagcgcggcgcggcagacgctggcggtcacggagggcgcgctggccaccacaagcggccagctgagcgaggcggagaagcagaaggcggtgctcatgcgcgacatgcaggccagcctgggccggctgggcgacctgaagcagcagctcaacagcacgcggcagcaggcgggccagttcgaggaggccgccaagaagttccagggcgaggccgaggccgccacgggccgcctggcgcagcttcaggaccaggccgcagcagcagtcagccgctcgcaggcggccgagaccaagctggctgacctgagccaggcgctggcggaggcggaggccgtcaaggcctcgctgctgcgcgacagccagttggcgctgggcgcccgcggcgacctcaagcagtccctcaacatggtgcaggccaaggtgtcgcggctggaggcgcagatggcggcggccaagggcgaggccagcgccacctcgctggcggcgcgggaggcctcgcggcgggcgcagtcggcggaggcggcgctcaaggagagcgagagccggcgcgcggcggcggaggcggccgcgcgggcggcggagctgcagcgcgcgagcgcgatggcggtggcgcagggcgcgattgggcgcgagggcgacctgaagcaggcgctcaacaaggccaagcagtcgggctccaagctggaggatcaggtggccaaggcgcgtgacgccatgaaggcggcggaggagcggcgcgcggcggcggagaaggccatggtcaacatgcagggccagctgagcaacacggaggccaagttcacggaggcggcggcgcgcgtggcggaggcggagtcgctactgcaggcagccgaggacgcggagcgggcgacgtcgcccggccgggccggtcgcaacggcaccggcagcggcaacggcactgggagcggcgccagctacggcgtcagcggcagcagcgtccgcaacagcgttctcaagacgccctagaggggcggcggtggcagcacagcagcacacggcggcggcggcggcggggacggacagcaaagaatcggggaacgggataggacttgtctttgaagccgggtgggttgggttgggttgtgggacaggtaggaaaacagtagtcgccaggtcagcagacgggagcagcgctgctggtgtgttgagttcgggggaggggtcctgctgctcggaggttgcttagccatcaattttaccacgaatggcaacatcgcaccacctgctgacgccgggcttgcgccattcgttttacggcacccttgaaatagagcgggagcaggcgtagagagagagtgccgtgcacgtaccattcacttatgaagacggaacacgtgagagagatgtgtttgccggtgctcacggtaagctgttagtcattcccctgccaccatgagtatttccattacatcttggcagcagtgagcgatggagtatgcgtgtgtgattcgttgccgctacagccttcgcggcgtgagtttttttgttgcggaaggggagcgggctcgaccacgggcctctagcttatcccctgtgacgcccctgattgtgtagctgtttgaacaggcacgaattcacgcacgcataccagcaatcggcaccgccctctataccgggcgttcgctggtgaagtgtgttgttccccggacttaactgtggctaacttaactattcgggcggtagggagcacccaggttgtgcgtcgcatgaaagcgcctgcactggcggtctctatggcacagtgcctgctttatgccaggctgctgcagtcccctttgtgtgtggtggggcgtcatgagagctgccggcttgggtttgcattgtgtggctcgtgttgggggcaggcgaggctcgatgcgtggcacaggcaggccctcggcgcccgcaaggggcatgccatcccccgcacaagctagtgagctagtagaggatgtggtgggtatggaggttagcgtagccgtgtcacaggctgccgaagggcggcctgtgtgcgttgcaaaggcgggttgtagtactcggctgcaatgaagttgaggttggcgcgaccggacccgcattggatcactttcgcgcgcttcggaggaatcagaggtttgggccacggccgggccatagacagtttggcacagcgttattggagcttatgtgggaccgcacgtctgtgacgaattgaggcggacggcgtggctagagtgctcctttgagacgtagtctgtaacaaacacttggtttgtgtgcatgcggccccggccttgacggctgtgcaggctgctcgcagcaacacgtcggcgcccacatggcgggcctcgggcgatcgggcct

SEQ ID NO: 85 - DNA, 3597 bp, Chlamydomonas reinhardtii
atgttcgagcccacagctgcgccatcgccgaagtcggcttcggccgcctccagcagccccgcagcttcctccagctcgtcctcctcctcgaccacctcccggccgcggccgaagaagaacaccgtgtcgggcagcaccaccaccggccggaccagcagcagcagcagcagcaacaccagcagcggcaatggcagcggcggcggcgggggcttcaacttcggggctgtgggcgccacagtgctgggcggcattggagccttcctggggctgcagcagttcggcaagacgtcggactcctccaaggctgcggctctggcccaggctgtggagcggctgggtgagaagctggaggacaaggagaaggagaaggaggaggtcaaggcggtgctgcagagccaggtggaggagctgaaggaggagaaggaggcggtgatgcaggcggccaagtcgcgcgaggacgagcttcaggcggtggcggtggagagccaggcggtggcgcagcagctggagagcgaggtggcggcggcgcgggcggccatccaggacaaggagcgcaagatgctggagctggagaagcagatcgccaagatgaagcagcagatctcaatcggcaaggaccagctgctggccacaaaggacatgaaggaggccactgcgctcatgacggacctggcgcccaaggaggtcatgctgcgggagctggaggcgcaggtggcgctgctgactgtggaggccaaggaggcgcgcatgctgctgggcgagcgcgaggccaaggtggcggcgctggaggggcaggtggcgtccatgcagtccattgtgcagtacagcaagcaggagctcagcctgcgcgcgcgggacgccgcggagctgacgcaggtgaagcaggagctgatgaccaaggagcagaaggtccgagagatgaagcagctgcttgcggagctgcagatgcagcagcagtccagccggctggagatggagtccatgcgcgaggagctggacagcgcccggtccattgccggcgagctggagaagcgcaacgcctcgctcatgcgcatgacgcagcagagcctgggccgcgagggcgacctcaagcaggcggtcaacagcaccaaggcccaggtggccaagctggagtcggcggtcaacaccgccagccagcagctgcagcagcgggcgcagcagctggcgtccgtcaaggcctcgctggacgagcagacggcggaggtggcggcgcggcaggaggcgctggaggcgcgcgaggcggcgctggcggcggcccggcagcaggcggaggagctggaggccaagaacacggtgctggtgcgcagccgcagtgtggagctgggcaagatgcaggacctcaagcaggcgctcaacgccacccgggcgcaggtgaccacgctggagaagcaggtgaaggaggccaacgtggcgctggccgtcaagtccgccaagctgcgcgagctggaggtgcaggttccggcgctgcagaaggagctggccaccggcaagcaggctctggaggcctcgcgcgccgagctgctggctgcccgcagcgccgcctccgacctggaggccaagaacacggcgctcatccggcaggccaccgccagcctgagccgcgagggcgacctcaagcaggcgctcaacatcagccgcgccgagtccgccaagctggacgacgagctgaagaaggccaaggccggcctggccgccgccagcacctcggcctcggaggccaaccagcgcctcaccgtggcggaggccaaggtgcgcgagacggagacgcagaaggcggcgctggtgcgcgacgcgcagatggccctgtcgcgcgccagcgacctgaagcaggcgctcaacgtgttcaaggagaagagcgccaagctggacggcgagctcaagagcgcgcgcacgcagctggccgccgccaccagccaggcccaggccgccaaccggcagtggcaggacgcggagaacgcgctgcgtgaggcggagcagcagcgcgagaagctggtgaagacggcgcaggtagcgatcaccaagtccacggacctcaagcaggcgctcaacgccaccaagcagcaggccaccaagctggagacggaggtcaagcaggtgcgcggccagctggaggcggtgggcggccgcgcggcggaggcggagaagaagctgaccagcaccagctcgcagctggaggcggcgcgggcggagcgcgagaagctggtcaaggaggcgtcttccgcaatcaccaaggccactgacctgcgccaggagctgaatgccacccgtcagagcgccaagcagctgaacacggagctgtcccgcgcgcgcgagcagcagcagcaggcggcgcaggcggcggccgccagcagccagcagctggcctccacgcgctccgagctgagcagcaccgcggaggcgctggcggcggagcaggcgcgcgtggagaagctgagcgagcagcgggcgctggcgctgcgggagagcaaccagatgaagacggcgctggagtccaccaagcgccaggcgacgcggctggaggcggaggtgaaggccacccgctcccagctcaaggcggcggagcaggaggcgcgcgaggcggaggagcagctgagcgcggcgcggcagacgctggcggtcacggagggcgcgctggccaccacaagcggccagctgagcgaggcggagaagcagaaggcggtgctcatgcgcgacatgcaggccagcctgggccggctgggcgacctgaagcagcagctcaacagcacgcggcagcaggcgggccagttcgaggaggccgccaagaagttccagggcgaggccgaggccgccacgggccgcctggcgcagcttcaggaccaggccgcagcagcagtcagccgctcgcaggcggccgagaccaagctggctgacctgagccaggcgctggcggaggcggaggccgtcaaggcctcgctgctgcgcgacagccagttggcgctgggcgcccgcggcgacctcaagcagtccctcaacatggtgcaggccaaggtgtcgcggctggaggcgcagatggcggcggccaagggcgaggccagcgccacctcgctggcggcgcgggaggcctcgcggcgggcgcagtcggcggaggcggcgctcaaggagagcgagagccggcgcgcggcggcggaggcggccgcgcgggcggcggagctgcagcgcgcgagcgcgatggcggtggcgcagggcgcgattgggcgcgagggcgacctgaagcaggcgctcaacaaggccaagcagtcgggctccaagctggaggatcaggtggccaaggcgcgtgacgccatgaaggcggcggaggagcggcgcgcggcggcggagaaggccatggtcaacatgcagggccagctgagcaacacggaggccaagttcacggaggcggcggcgcgcgtggcggaggcggagtcgctactgcaggcagccgaggacgcggagcgggcgacgtcgcccggccgggccggtcgcaacggcaccggcagcggcaacggcactgggagcggcgccagctacggcgtcagcggcagcagcgtccgcaacagcgttctcaagacgccctag

SEQ ID NO: 86 - protein, 1198 aa, Chlamydomonas reinhardtii
MFEPTAAPSPKSASAASSSPAASSSSSSSSTTSRPRPKKNTVSGSTTTGRTSSSSSSNTSSGNGSGGGGGFNFGAVGATVLGGIGAFLGLQQFGKTSDSSKAAALAQAVERLGEKLEDKEKEKEEVKAVLQSQVEELKEEKEAVMQAAKSREDELQAVAVESQAVAQQLESEVAAARAAIQDKERKMLELEKQIAKMKQQISIGKDQLLATKDMKEATALMTDLAPKEVMLRELEAQVALLTVEAKEARMLLGEREAKVAALEGQVASMQSIVQYSKQELSLRARDAAELTQVKQELMTKEQKVREMKQLLAELQMQQQSSRLEMESMREELDSARSIAGELEKRNASLMRMTQQSLGREGDLKQAVNSTKAQVAKLESAVNTASQQLQQRAQQLASVKASLDEQTAEVAARQEALEAREAALAAARQQAEELEAKNTVLVRSRSVELGKMQDLKQALNATRAQVTTLEKQVKEANVALAVKSAKLRELEVQVPALQKELATGKQALEASRAELLAARSAASDLEAKNTALIRQATASLSREGDLKQALNISRAESAKLDDELKKAKAGLAAASTSASEANQRLTVAEAKVRETETQKAALVRDAQMALSRASDLKQALNVFKEKSAKLDGELKSARTQLAAATSQAQAANRQWQDAENALREAEQQREKLVKTAQVAITKSTDLKQALNATKQQATKLETEVKQVRGQLEAVGGRAAEAEKKLTSTSSQLEAARAEREKLVKEASSAITKATDLRQELNATRQSAKQLNTELSRAREQQQQAAQAAAASSQQLASTRSELSSTAEALAAEQARVEKLSEQRALALRESNQMKTALESTKRQATRLEAEVKATRSQLKAAEQEAREAEEQLSAARQTLAVTEGALATTSGQLSEAEKQKAVLMRDMQASLGRLGDLKQQLNSTRQQAGQFEEAAKKFQGEAEAATGRLAQLQDQAAAAVSRSQAAETKLADLSQALAEAEAVKASLLRDSQLALGARGDLKQSLNMVQAKVSRLEAQMAAAKGEASATSLAAREASRRAQSAEAALKESESRRAAAEAAARAAELQRASAMAVAQGAIGREGDLKQALNKAKQSGSKLEDQVAKARDAMKAAEERRAAAEKAMVNMQGQLSNTEAKFTEAAARVAEAESLLQAAEDAERATSPGRAGRNGTGSGNGTGSGASYGVSGSSVRNSVLKTP

SEQ ID NO: 87 - DNA, 336 bp, Chlamydomonas reinhardtii
ggtgttgggtcggtgtttttggtcttggttggggtgttggtggtgctggtggaacatgtcaacatgcccaggaaaccaaggcgcgctagcttcctgggcgcagtgttccagctgcagtacacctggtcccgctatttgaatctcgctgatcggcaccatgggggtggtggtgatcagcgctattcaggtagcgggaccaggtgtactgcagccggaacactgccaggaaggagggggaggctgggtgggagaagcggtgtggggcggattagccttggagaccgattgctttgggttagtttgggctggcatagtttgggctggcttagttacacc

SEQ ID NO: 88 - DNA, 34 bp, Artificial Sequence
  Primer 1
  misc_feature (5)..(10): AseI site
gactattaatggtgttgggtcggtgtttttggtc

SEQ ID NO: 89 - DNA, 33 bp, Artificial Sequence
  Primer 2
  misc_feature (5)..(10): BamHi site
gactggatccggtgtaactaagccagcccaaac

SEQ ID NO: 90 - DNA, 28 bp, Artificial Sequence
  Primer 3
  misc_feature (1)..(6): AseI and BglII site
agatctcagctggaacactgcgcccagg

SEQ ID NO: 91 - DNA, 42 bp, Artificial Sequence
  Primer 4
  misc_feature (16)..(21): BglII site
gcagtgttccagctgagatctagccggaacactgccaggaag

SEQ ID NO: 92 - DNA, 22 bp, Artificial Sequence
  PCR primer
gtaatacgactcactatagagt

SEQ ID NO: 93 - DNA, 19 bp, Artificial Sequence
  PCR primer
actatagagtacgcgtggt

SEQ ID NO: 94 - DNA, 20 bp, Artificial Sequence
  PCR primer
ctaatacgactcactatagg

SEQ ID NO: 95 - DNA, 20 bp, Artificial Sequence
  PCR primer
actatagggctcgagcggcc

SEQ ID NO: 96 - DNA, 27 bp, Artificial Sequence
  PCR pimer
gaccaacatcttcgtggacctggccgc

SEQ ID NO: 97 - DNA, 21 bp, Artificial Sequence
  PCR pimer
gaccaacatcttcgtggacct

SEQ ID NO: 98 - DNA, 27 bp, Artificial Sequence
  PCR primer
acttcgaggtgttcgaggagaccccgc

SEQ ID NO: 99 - DNA, 21 bp, Artificial Sequence
  PCR primer
ctggtgcaactgcatctcaac

SEQ ID NO: 100 - DNA, 22 bp, Artificial Sequence
  PCR primer
acttcgaggtgttcgaggagac

SEQ ID NO: 101 - DNA, 18 bp, Artificial Sequence
  PCR primer
ctcgccgaacagcttgat

SEQ ID NO: 102 - DNA, 19 bp, Artificial Sequence
  PCR primer
ggctcatcaccaggtaggg

SEQ ID NO: 103 - DNA, 27 bp, Artificial Sequence
  PCR primer
cgaatcaatacggtcgagaagtaacag

SEQ ID NO: 104 - DNA, 22 bp, Artificial Sequence
  PCR primer
cgaatcaatacggtcgagaagt

SEQ ID NO: 105 - DNA, 23 bp, Artificial Sequence
  PCR primer
aacagggattcttgtgtcatgtt

SEQ ID NO: 106 - DNA, 19 bp, Artificial Sequence
  PCR primer
ctgctcgaccctcgtacct

SEQ ID NO: 107 - DNA, 21 bp, Artificial Sequence
  PCR primer
gacttggaggatctggacgag

SEQ ID NO: 108 - DNA, 19 bp, Artificial Sequence
  PCR primer
ctgctcgaccctcgtacct

SEQ ID NO: 109 - DNA, 20 bp, Artificial Sequence
  PCR primer
gaaaagctggcgttttaccg

SEQ ID NO: 110 - DNA, 26 bp, Artificial Sequence
  PCR primer
agagctgccaccttgacaaacaactc

SEQ ID NO: 111 - DNA, 20 bp, Artificial Sequence
  PCR primer
caacacgaggtacgggaatc

SEQ ID NO: 112 - DNA, 27 bp, Artificial Sequence
  PCR primer
tcctccacaacaacccactcacaaccg

SEQ ID NO: 113 - DNA, 20 bp, Artificial Sequence
  PCR primer
gagctgccaccttgacaaac

SEQ ID NO: 114 - DNA, 20 bp, Artificial Sequence
  PCR primer
tcctccacaacaacccactc

SEQ ID NO: 115 - DNA, 3597 bp, Chlamydomonas reinhardtii; identical to SEQ ID NO: 85

SEQ ID NO: 116 - DNA, 1065 bp, Chlamydomonas reinhardtii
atgccgtcgacgcttcaaggcacgttccacacctaccgcattatcaggcggctgggacaaggagccttcggagaggtgtctctagcgggcgtactggagacgggtgaggtggtggcactcaagcgcatccacattcgcaacaccgggggcatacctgacgtggtggtgcgcgagatcaaggcgctgcagagcgtgagccatcccaacgtggtggcgctgctggatgtgttcccaaagggccaggccatctacctggttcaggagtactgcaccaccgacctggcggcgctgctgcggcggctgcccgcgcccccgccggagcgcatcgccaaggggctcatgctgcagctgtgccgtggcctggaggcgctgcacgcagagggcatcatgcatcgcgatgtgaagccgagcaacacgctgctgtccgccgcctccggcaccgccaagctggcggactgcggcctggcgcggccgctggacggcggcgagcggcccgcctacacgcacgcggtggccacgcgctggtaccgcgctcccgagctgctgtacggcgctcgcgcgtacggcccggcggtggacgtgtgggcgctggggctggtgttcgcggagctgctgggcctgtctccgctggtccccggcgacaacgacatcgaccagctgggccgcgtcatcgccaccttcggctctatggagccagtctggctgggcgtgcgagcgctgccggactggggcaagatcgccttcccgcactgcgagccgctgccgctgggcgacctgttgccgggcgcgccggcggcggccctggagttcctggcggccttcctcaggtacgacccagccaagcgcatcactgccgcgtgcgccgtacgcagcacctacctgaccgccacgcagccgctgccggctgacgaggccgaggtggcggcctggctcaccgccacactggccgccaacgaggcggcggtggcagcgctgaagcagcagtcggcggcggggtcggcggcgcagctgcacgtgggaagcgcattaaggcagccgcgggcggcgtcattgccgctggtgtga

SEQ ID NO: 117 - DNA, 1539 bp, Chlamydomonas reinhardtii
atggcgacccgagcagttctccagacgtttgagcggtatcagaaggagcgggtggccttcgtgaccgcggtggcagaaatggcaaagaacccgcaaaacatcgaggccctgcaacaagcaggagccatggcactgctgcggccgctgctgctggacaatgtaccaagtatacagcagtccgcggccctggcgctagggcgattggcgaactacagcgacgatcttgcggaagcagtggtgcagaacgaaatcctgccgcaactggtgtactctctgagcgagcagaaccggttttacaagcaggccgcggctttctgccttcgtgcggtggctcggcactccccagagctggcgcagtcggttattgacagcggcgcgctggattcgctagttacctgcctcgaggagtttgaccccggcgtcaaggaggcctcagcctggacgctgggctacatcgcgggccacaacgcggagctggcgcagcaggtggtggacgctggggcggtgccgctgctggtgctgtgtgtgcaggagccggagctcagcctgaagcgcatcgccgcctcggccctgtccgacatctccaagcacacgccagagctggcgcaggcggttgtggacgcaggcgcggtggcataccttgcgcccctggtcatcaaccaggacgctaagctcaagcgccaggtgtgctgcgcgctcagccagattgccaagcacagcgtggacctggcagaagtggtggtgggcgcggagatcttccccaaaattctcacttgcctcaagttcccggacgagttcgtcaagaagcacagcgccacggtggtgcgcgaggtcgccaagcacacacccgagctggcgcagctggtggtcggcaacggcggcgtgggcgcgctggtcgactatatcagcgactctgcgggcaacaaccggctgccgggcatcatggcgctgggctacatcgccgcgttctcggagacgctggcactgtcggtcattgcggagaaggccctgccgccgctagtgtcggcgctcaacgaggagccggaggaccacctcaaaagcgccaccgcctggacgctggggcagattggccggcacacgcccgaccacgccaaggctgtcgcagacacaggctgcctggcaacgctggtttcgctggagagcgacggcgcctccagcgacgacctcaagaccaagtgccgccgcgcgctcaagtccgtcatcgccaagctcacgcacctgcccgcgctggacgcgttggtgcaccggcaactgccggagagcgtgatgaagatggtgctggagcaggtgggcaaggtgctggccaacgacgcggcgggccgcgcgcagttcgtgcacagcggcggcctggcggcggtgcagcagatggcggaggcgcccggcagcaagctgaaggaggcggtggagatcatcaacagctgctaccccgaggagattgtcaagtactacagccccagctacagccagcagctactagagaagctggagagcatggccgcaaccactacggcgtactaa

SEQ ID NO: 118 - DNA, 2586 bp, Chlamydomonas reinhardtii
atggggagcttgggccatgaagcagtcgcagcggcgcagttccgtgccgctgagttggcgaggcgaacagtggaataccatagttcccgcgagggtgagcaccgcgcacgcgaccgcttgggcggccgcttcacgccctacccctgggccgacgcggcggcggcggtgctggcagatgaggtgctcgaggacgaggagctggtggtggcgctgatccgggagctgggcaggcagggctgctctgaggtggcggtggccgcactggacctggtgctgtcacgtgccgggtctgacggggacggggccggggccgggccgggcggtctgccgccgagcaaggggctgttcgactcggcgctactggtgtgcgcggcggagtaccaggatgagcgttgtgtggccctgtaccggcgcatgcggcaggcggggctggcggcggacgtggggtcactcaacctggcgctgacagggctgtgctgccggggacggctggaggaggcggtggagctgctggagcaggaggtggaggacagcggcggcgtcatcaagcccaacagcttcacagtgctcatgatactgcaggcgtgcaactacaagcggcgaggtgcctaccgggaagccatcgacgccgtgcgggctctagagtcgtgggggcggcccgccaacgaggaggtggtggaggcgctgctgtgtgtgtgcgaggctgccatgcacaaggcgcccagcttcgaggcggcggtggaggtgttcagcgcgctggcggagttgcagctggcggacagcacacgcgtctacaacggactgctgggcgcggcggggcgggccggcaggtggcgagaggcacaggcgctgtacattgcgatgcaggcggacgacatccccgccagcctggagacacacacagccctcatccaggcgtgtgtggtgggccgggctctggaccacgcactagacatattcgagttcctggtggcgggccgcgccgcgcacgagctggtgccggcgtccatccagacctacaaccacctcattcatgcctgccaccaggccggcatgctggagaaggccctggagatcgcggcctgggttcagaagacgggtgtggagttcaacgacgagacgtacgaggagctgatggccaccattgaggtggcgcagctgtgggatgagaaggccatgaagcaggccctgaagcgccacccggctgtgctgcccaagcacctccggcccgcgccctatgacgccatgcgggtgctgtacctggaccacctggagactctgcagcaggaggagctgctggcgctggaaaagctgggcacactgggcagctgggcgcccaagtcgctcaccaagggcctcatgggcgagcagcacgagcagatgatgcgcgagcagcagcaggcggcgggcgcgggcgcgggtgccggcggcaactggacggcctcggcagaggcctccagctggcgcggggctggcgggctcggtctggatgcggaggcgtccactgcctcggtctcggtctcggccccgggtccgccgctgtcgtatcgggacatggccgcagccatgcgcgcgtccatgcccgctctggcttttgggggcggtggcggtggcggcggcggcggcggcggtggcgcggcgacggcgctggcggccgtgtcaggcgtcgtcgggctgggcggcgagtcgtctgttagctccctggcaggcggtggcggtccgccggcgggcgccccctccatgcggcagctgctgaccagcatgtccatgaagcggatagcgggcggcggcaatggcggcccgggggcagggtcagcgtcgacggcgctgtcgttcagagcacctggcatgcggagtctgctaggcgcagcaggagcagctgtgccagactcacctactgcctcctcagccgccgccagtgcctcctctcccgccggcgcagcggcaacagtaagctcgcagcagctgggagcgggcggcggcggctccgaacctgcacccaccggctttaaccagccgcccacgtgggcgcaggtgcaggtggcggacgcggccaccgcgggccccggcggcacgccctttgtgacgcctcaggcggcgtcagtgcgggcctcggcggcgggcaccgtgccgccgctgtcgctggggtcgggcctggcgctggcggtggagcccgccaacctgcagggacagccctcggccggatcgctgggcggcacaccccgcgtgtcggcgcgcggggtggcgtcgagcagggcaaggcctgtgccgccgccggtcgcaaccgcgggatcagtgggtgccggcggactgccggcagtggccggggcgggccagggtggcggcattcatgcgagtgctggtctgctgccgctggcggacgcgggcccagcgctgggcagcccgcggggtgcgggcgggccactgccggctgcggcaggcagtcggttgcgggcgctcaatcccagtcttcaagtggcggtgggcggcccggtgtcgcatgacttcctgccatcacctttgcccactatgccacccacctcattgggcgccggcagcgggcggcggccgggcggtttgcggtga

SEQ ID NO: 119 - DNA, 19029 bp, Chlamydomonas reinhardtii
atgcgggcgctggtgggccggctgcaggcgctgctggagcagggggcggcaggaggcggaggaggcgggggaggtgggggcgctggcgaggaggcgggggtggcgggcgaggcgggcgggcgggtggtgctgctggcggcccgtggcgtggcggccatggcggagccggtggcggcgctggaggggcagcagggcctggcggcgctgcttcgctcgctggcggcgcgcgccgccgccgccgggccgccgcttcccgccgagtccgagctggcggcactgccccccgggtcggtgctggcggcggcggaggcggcgccggcggctgtgtacgacagcgggagccgggtggaggcggcggcggtgctggcggctgcggtggcggcggtggcggcgcgggggccggttctggacgacgcgggtgggcggctgctgcgggagctgcttgagagggtggtggccggctactcgctggtcgcggccatgggtgtgctgcagcggcgagtgcacggcgagctggcggcggcgctggcggcagtagcagcgcaccagcccgcccgactgccggcgctgctacagccgctggcggcgctgctgctcagcctgtcgctgcagcagccgcagctgcagccggacggcggcgtgggcgcggcgctgggagatgcgggcggcggaggtgcgggtgcgggtggcggcggcacggcgctgctgccggactcggaccccgagcagcaggtccggccctgggaggtgtacatagagctgtggcgggcgctgctgctactgccggtggggcccggcggccgcctgggcagtagcagcggcggcggcagcggcagtagcagcggcggcttcacggccgagatgcaggcggagctgtgccgcacctatagcgccgccacccagcgccgcctgcgtgccgccgtgtacgacgccctcatatccgccgtactggacgccgcccgccacttggacctgtcgtacagcctgccgccgccaggcggcacgggcggtacggcaggtgccggttacggtgatgatggggatgatgatgcggcggttggcggcggcggtggcggtttgacggttgtaaccgacctgtacggcggcctggtggccaacgacctgtacgacatgatggccttcttccacatgcgcgattttctgggcgagctgctgccggccgccgggcccggcctgttcgcacgctgggcgctgccggcggctgaggcgctgtgcggcctggcggcggagcggcccctggtcagcgccacatacagtctggccaaggtggccatggatttagcagaacaggccggagctctggcgcccccacccgccacacccgcagccgccacagccgcagccgtagccgcaggaacccgtcgctacggtggcggcggcgcggggggcgcaggtgcggcggtggcggagcaggaggaggaggcggacgtggcggcggcggcggcgcgcgcggcggcggcgacatcggagctgttccgcggactgctggcggcggtggcggcggcgtgtccgcattacaaggacgagctgctggtgtgctgcctgcagctgctgctggcggcgccgccgcacctgctggcagcagcagcagcagcagcagcagccggcagtagcaccagcactagcggcggcagcagcagcaccagcagctacagcctctctgctacagccgccggccagggtctggcgctggcgctgcggctggcgctgccgctgggactgcagcaccttccggtggcggcggcggcggtggaggcgctggagcggtgggagcagcagcagccggcggcgctcagggccgcgctgccgtactttgtaccgctgctggagccgtacctgtccgagcagtccggcgcggcggcgctgcaggccgaggccgacaacatggcggcggcggcggcggcggagcccggcggcggcggagcaggcggcggcggcttcggggagggtgctaagagcggcgtggcagctgctcgcgccagccgcgccgccaaggcagccaaggccgccgcgccggacgcggcctccgctctggagggcctgcagtgccggctgcagctgtggctgggccgcaaccccgccgccgcccgacacctggtggcggtggacctggcgtcgctgctactgccggcggcggcggctgctactgctgacaccgcgctcggcagtagcagcggcagtagcaacggcggcgtggtcgggcctgcggcgcagcggctgctgcagcagctgccctgggacacggactcgaccaaggtggcgttgcgggtggcggtggctgtagcagcgccgccggcggaggccgccgccgacggcggcgcggacggcgcggcccccgacggcagtagcagtggcgatggcggctggagccgagtggtgttgcacctggacctgctactgccgcatgcggcgcggctggcggaggagagcccggcgccgcaggctcggtcggcggcggcggagctgctgcacgcggcggcgctgtgggtggtgggagccaacgccgcggtgcctgaggaggggcagggccgccgtgactacgagcggcgcgtcacgcgcttccagccgctgctggcgcggctgtttccggtggtgctgcggctggcggcgggtcccgagcccctggcgcgtgagctgttccggcggctggcggggcagctggtgcactggtacacgcggggcgcgcggcgcgagggagctgaggccatggcgctgctggaagccgtcctggctggactgtgtggcggcggcggcggaggcggaggcgggggcggaggaggaggcgggggcgggggcgcgggaggaggcgcggggtcgctgcgggacctgtgtgcggcgctgtgcgcggagtggttcacgtgggctcagaagcagaacctgggcagcggaggcggcggcggtggcggaggcggtgaagccacctcctctgacgccttcgtgtcggtcaacgccgccagcctgctgcgccgcctgctggacagactggcgcagcccgaccccggcgtgcggcgcggcgcggcggcggcgctggcggcgctggcccggccgctggcggcgccggcgctgggcggcggcgcggcggcggcgggcggtgtgctgctggaggcgctgtggctgctggcggcggcgttgaggcacccgctggcggacgagggcggcgacggcggctcctcctcggctacagccgccgccggcagtagcagtagcagcaatactgccaccaccaacaacaacaacaacagcggcggcggcggcgcgggcggcctgggctacggccccgccctgtcccgtgcggtggcggcgctggtgcaccactgcctcacccgggagctggcggaggagctcacgcggcccctgcccggagaccccagcctgctgctactgccggctgcggctgctgctgctgctgctgctactgcggggaggggtcgtgggtgtgctactgccggggctgccggactgagcgcggcggctgaggactatggcgacggcggcccggacgcggacgtggagtggggcgaggaggaggaggacgcggaggcggcagggggcggggcaggggatgtggagatgcgggaggcagggcagcagcaggggcagacccagggcgggctgggtctggggctggggctgtcagctgcggtggtggtggtcccgccttacagcacactgcagacgctggtgctgtggctgtggaagggcacgggcggcctggcggcggcggcgggctcggctgcggcgcggcgtgaggcgatgcggctgcaccacaggctggcgggggcgctgctggaggtccgcgcacaggaggaacgcgaccggcgcatcaccgaccgcggcggcggcggcggcggtggcccccacccggcaccgggggcgggcgggctgctgtcccatatcctgatgatggggggcggctcacaggagggggaggaggaggaggacggcttgggcagccacggagcgcacggggatcacggcggcggcacgggtgctgctacagccgctactgccgctgctgctgctactgccagggtggagcacgcgggccccgcctgtgcggcgctggcggacctggggcggccgctgggctacagcgcctgctgggtgagctggcgcgtggcggtgcgctacagccgtagcggcagtagcagcagcggcggcggcggcggcagtagcagcgacagcgcgcggctgcggatgctggtgccgttcctgctcacgcagccgccggcggcggcgctcacggggcccggcggcggcggcggcggcggtggtgcggatggcgcagaggcggcggcggcgggggctgctgcgcggtgccgcgtgtggctgcggtctgtgacggcggccctagactggatgcgttgggccctggaccagggggtcctactggccgccgaccttcccgacctagtggacatggcccgggaccgggccgcccgcgacacacaggaggcggcggcagcagcagcagcagctacagccgcagcagcaggagtagctggggaggaggacgaggcagaggactggagaatgcgaaggaggaggaggcgcggcggcgcgcccccgcagccctgcgccaccctgcccgactccctgcttgagctgctgtgccagctgccgccggtggaggaaggcgtgagcggcagtagcagtagcagtagcagcagcggcgcccagggcggcggcagtagcagcggcagtagcagtttgctgctggccggcgccgggtgccgcggcgccacgcgggacgcctgcctgtcgctactgcggctgatgcaagcgctggtggagctggaggcgcaggctgtagcagcagcagccggcagtagcggcagcggcggtagcagcaccggtggcggtggcgctgctacagccgccgctggcgacagcggctgcgactactgctgccccagtgaggcgctggtgccgtggcgggaccgcgacactgccaatgtggtgctggcggcggcgctggccccgcacgtggtcggggcggcggcggcggacgtcgcggcgcgacgcatgggcggcagtagcagcagcagcagccatgcgggcacgagcagcggcagtagcagcaggggcgcggcggggccgctgactgccaccctggagggtgggctgcgtgagctgctgcggcgcacgctcgactcggctgctactgccctgggcgctggcggccgccccggcatggcggctggtggcggcggcggcggcggcggcggcggctggggcgaagccgcggaatcgatggaggtggatgaggtgggtggcggtgaggaggaggacgaggaagaggaggacgaggagggaggtgaggcggaggcggctgccctgggactggggctggggctgcgggcgtccggcaagagcggagctggagagccggcggacgcaggagcagcggcggacgaaggagcggcgacggcgcgtgtggaggcggcggcggcggcggcgcatgtggaggcggcgcagcggcgtgcgacggcccgggcgctgcggctgctgggcggtcgggcggccatgctagcaggcgacccactgcagacgtccgccttcctgacaggcctgtccggactgctggcgctgccctggcccgccgcctccacgaccagcggcagcggcagcggcagtggcagtagcagcggcagtggcagtagcacctccctggtgccggagccgctgcgggtgcggctgcggggccggtgtctgcagctggcgcggcggctgccggcgggcggcgaggcgtcgccggcggcacgcaaggccgccacagacgcgctcagcctggcgctgcagctgcagctgcccgccgccgacctgctgcacgtgctactgccgctgccgccgccacccggccctgctgctacagccgccgcctgtgctacagccgccgcctggaccccagcagccctggagcaggcgcagtcgggcgccgcggacggggccgtgttttacgacaacttcagggccgtggtgaaccgtgccctgctgttcgaagcagacacggccgtacggcacgtgatgaccgccctggcggccagcgcgcagctgctacagccgggcagcgctacagccgccgcgccagaggcagtagcggcggcggcggcggcggcgctgcgtgctacagccgaggcggtgctgggcggcgtgatggagagcctcatgcgctcccgcgccgccgccgatgccgccgctgctactgccgcggccgctgctgccactgccgcggctgcagcctctgccggtgccgcaggcgccgccgcctcgcagggagcggcgggcgccacgcaagccgcgcgcgccacccaagccacgccagccgccacgccagccgccacgggcgcgcccgctgcgcccccgctgcggccgcccccgccctccttgccccgcgccgtggacctgcacctgtccgccttcaccgccgccctgcgccgccacctgcccctggcggcgccgctggcggctcgcggctcgccgcccgagggccgcctgcttctgctgcggctgctgcggctggcgctgcggctggacgcgccggggctgctacagccgctgctacagccggcagcggcgcatggcgcgggtgctgctacagccgcggcgccgtcctcgtcctgcctggccttcatcctggactgctactgctccatgctgtcaccgcagcaggacgccagcgtcacctggacaccggcgctgcagctactgccgctgctggccgcacagctgccgccccagcacgcagtgctgggccgcctgttcacactcggcagtagcacgggcgccgacggcagtagcagcagcagcagcagcagcagtggcgttaacgctgccaccaccggcgccgtcagtgcgctggtggcggcggtcatcccgcccgacagccgccgggagctgggggacgccgccgccgccgccgccgcctcgcccgccggcgccgccctgtcacagcggctacacgctctaatgctgacgctggaaggactggcggcggccgccgccaccgaagccgcagtagcagctgctgctaccgccgccggtgctgctactgccggtgctgctgctactgccggttcagcggccgcagaggcgggcgcgggcgcggacgggtctgggtctgggtctggggcgggtgtgcgggcggctgcggcggaggcgctcctccgtgacctgctggtggtggttcaggacatgggcggcggcggtggcggtcacgtgctgcagagccgcctggccgccatgttcacacgcgtggccgcagcggcctggctgggcttccccgccgttggtgctgctggcggtggcggtggtggtggcggtggcggtggtgctggtggtggtggcgatgaggagtcggggagccaggaggaggcggcacaggcggagatggaggcggaggcggagcgcgcgcgggcgtggccgggtgcgaggctggtggcggcgtgctggcggtgggctggcggcggcggcggcggcgtagacggtagcggcggcggtggcggcggcggcgcgttgaagcgggagctgcggctggcgctgctacagcacgtgctattgccgctgctggcggcggcgccgaccgggttccgcgtctggtggtacggcagcaacgtacggcggtttgtgcagtacgtccagaaaaccgccgccgccaaggccgacccagtggcggcggcggcggcggcggcggcggcgccggaggtgctggcgggcgcgctggcggcgcggtgtgcggctctggtggactcgtgggtgtcgtacggactgctgcggagtatgtacggcacgtgcagcgcggcggaggtggagcgcgtgtggggcaaggccaatgagcatctggcgccggccagtggcggcggcggcggcggcggtgcgttgaagaacggcgtggtcatgtcggcggcgtgtgcggaggtgtgccgcccgccgccgcccgccgccaccaacgcggcggggctggagctccgggatttggaccgggacgtgcgctgcgcggcctgggccgccgccgccgcgctgctgctgcgcacccagtcgcgcgcggccttcttcgccaaactgcttagaccggacgcgggcggtggcgctgcggctgtgtggggcgcgctgctgcggcaggaccccgccttcatgctgcccaccgtgctggacgagggcgcagccggcggagcaggggccgcgggcgcagagaggcgcaagcggctgcgcaaggagcaggaggcggtgcgggagatgtttcggtcgctgcgccgccaacgtgacgccaacgcggcctggcacgcggcggcgacgctggcggcggcggcgggcgggactggcggcggcggcggcgcctccgccagctttatcatgggcaccctcggcggcggcggcgccagcctctactacactggcggcggcggcggcggcgacgtcgccagcctgacggccaaggtgtcggcgtcgcagtttgatctgggtctggcgtcgacgtcggccagcctggctggttcggctggctttgccggcggcggcggtggcggcggcgccgccgccgccacgccgccgccggcttcctttgcggcgtcgggcgcggcagggccgggcggcaaggccggggcggtggcggcagtgccctacacatggagtctcagcggcggcggcggcggcggtgctggtggtggcgatgacggacggccgctacccgccgccgccgctgcagccgttgacccggcggttgggctggcagcggttgaggatgaaaacttcctaaccgactccctgacctttttggacgacgagatggacgagcacgtgtgcatgctgccgctcgtccagctgatagagaagtacagcgacccgggcagttgggacgccgcgaaggaggcggcggcggcggcggccgcacgtgccgcgctgttccccgccgccagcgccggcggtggcagtagcaccagcggtggcagtagcacaggtggcgacgcgcccatgccttcttggctgcagacgctgtttgaggcgctcaatagcgaccacacgcccaggtacacgcggctgttcctgctcaaggccgtgctgcatgtggagtaccgccaccagcaggcgcgcatcgcgggcacacgccgccgctaccaggcgcaggctgtagcggctgtagcagcaggcgcgggccggggcagtagcagccagcgggcctcgcaggcggtagcagcagcaagtggtggcggtgtgggcagcatgcgtctgagcagcctgcaggctactgccgccgctactccctcggcgagcctgggtgttggcaccacacaggctacacccggcggcggcagcgccgcagcagcaccgcagcagcagccgccacagccgccacagcagccgctacagcctgcgggtgcggacttctcgaccaccgtgtttgctgtgtgggccgagcacttcttccccgcacttgtggcggcggaggcgctcggggccggaggcggcaatgcagccgccgccgccgccaccgccggcagcccggatggcggcgacgcggcaggcccggtggccggcggcggcgaccgacacaaggcggctgcacggggcggtggggcggcggaaggcggcgagagaagcggcgaggaggatgatgaagatggggaagaggaggattttgagccgcagctggcgcagcgccggcctgagggcgaggccacgctcacacagctgcggcgccggcaccagcagtacggagcagccggcggtgcaggcatgggtgcagcaggtggggccgcggcgcagaggctgccaggcatgggcgctgtagctgcaggcgctgctacagccgccgcagcgccaggcggcggcggcggtggcagtggcagtagcagtagcagcagttgcgggccgggcacgcttagtatcgtgacgcggctgctgatccagaccattatgagttggaggaagctggcgccggccggcagtagcagcagcaacagcggcggcagcagtgttgacacgccggcggcgggtgctacagccaccgccacggaagacgctggcggcggtggcggcggcggcggcggcctgccgcgtgggccgctgcgcgaggcggcggagcggctgctgcggcgctgtgtgtgtggctgcctgcaccccaccagcgcagaccagagccgccacaacgccaaccacgtcatcacgctgatgtacttctggcgccgagccggcgtgtcgctgctgggtcgcgagctggtgccgctgctgggccggcggctgccccagcggcagcgctgccagggcctgagggtggcgcgggcggcgctgggctacggccaggaggaggcggtgatggcgggcgaggcggctgcggacatctggaaggcgctggttggcatcaccgcctgccgcccgccgccgccgccgccacacaccaccagggcctcaggagccggcggcggcggcggcggcgggcacgcccaccaccactacaccggcggcgccgccggcgcccctcagctgtctgtggaggcggcgccgctggggcagctgttgggcctctactttgccaaactggcggagcgggaggcggcggcggcggcggcggcggcggcggcgggggacgctggtggcggggcaggggcggcggcgacgcccggcgcctggggctgggcgggcgctgccgcggcggcggaggcggaggaggaggatgagggggacgtgggcggcgggggcggaggcggactgggcctgacggctagggcgaccaagcgagcgcggctgtcaggaggctcctcgctcaaggacaagatgcaggacatccggtcggccctgcgtgaggccaccgacggcggccgcaactgggaggcggcggtggaggtgcttctggggctgtcgcagccgccgccgctagggcacccgcccgcagccgggcccctggcgccagagctggtcaagcggctgggcgtgttgcgcgacgtgcgcatggccgatgcgctcctggtgctcaggcgctgcgcgctggtggcgtcgcccgccgccgcccgcggcctcttcatcgacctgctggcctcactggacaggctgccgctgcgctccatgcgagtggaggcgcaggtggcggctctggagctggtgcaggccctggctccccgcgctccgcccgagcagcttcagcggctgctggcgctgctgttgcgccgcggcctggccgccgcccccgaccccgccgcccgcctggccctactgcgcctgtgcgccgcgctgtgggcgcagcgggggctggcctggccatcgccgcccaggcagcagcagcagcagcagcagcagcagcagcagcagcagcagcagcaacaggaggcaggcgcagctgctgctactgccgatgcggcggaggcggcgcggctgctacagccgctgctgctgccgctgctggcaggggcgctgggcgacggggacccgggcattcgggcggcggcccgggggttctggcaccggctgctgccgcccgcgccggcggagcgactggcggcgctgatccgtcttgcctcggagccggccctcacgcccaccacctccaccaccgcctcccccaccgccacagccctagccgccgacgccgccgggcggctgcagcgcggctggcccggtctggcggcggggctgctgctggcgccctccctggagccgggcagcgccgccgccgccgccaacgccgcggctctgttcaccagccagccctatgagtgcgagttcagggactacacacccagcctattcgcgggcggcggcggcggcggcttcggcggcggcggcggtgcaggaggcggcgggtcgctgtctctgcgcacgcccgcgttcatgatgtcacaggacgcctcgcaaggcggcggctacttccgtggccggcagcgcccgccccgcggcctgctgcgcgccaccgcctccgtgtccttcaaccccacagtgtcgttgtcgctcaccggggccggcggcggccccttcgcagcacccctgggcggcggcggcggcggcggcggcggcgccagccaggcctcgggcggcggcgcggcgttccttgggccgtcactggcggcggcggcacagggcggcggcggctcgcagcagggccttgccggcgcgagccaacagcacggctacagcctgggtgctgacggcagcagcggcggcggcacgagcggcggcgacgtcgtgcgtttggtggctcgcagccgcgcctacgtcggcgggggcaacggcggcgccggcgacaccaagcccggcggcggcggcgccaacttcgcggcgcggctgcggggcatgcgcgcgcaccaggcgcggcagctgcgcatggggtcgctgcggcgtcacggccgcgcggcgcgtgtgtcgctgttgcgcagctaccgcaccggcgagctgcccgacacgctgtcgctaaggctgggcgagtccttcctgcggccgctggcggcgctggtggaggccgacgccaccgccgccacggcggcgctggcggcgctgacggcggccgtgctggaggagggcaacaccgccgccgggtcggaggcggcggcggaggcggcggcggacgtgcccgccgctggcgcggcggagccggctggatcaagcggcgcggcggcagctgcgggcggcgatgacggtagcctggtgatcctgcggcagcagcagccgcagcacgccagctccgcagagcagcgccgcgccgctgccgagcgcgagcgggccgagcggcggcgggcggcgcagcagcgggggctgcacgccgcgctggcggccggcttcggctgccggcccacggcgccggccttcgtagcggcactgcaggcagtagcagcgcgcttcgccgaggccgcgctacagccggcatcactcaacggaaccttcccgccgccggggcagcctgctactgccgggggcgcagacgctgcagcggactcggaagcagcggcggcgggggccgtagcagcgccgccgccgccgctgctgttgctacagccggccgacgtgctggcggcggcgggcgcctgcggcggccagcaggcggctgctctgcttctggagacgcagcaggcggcgctggaggagcgcggccgccgcctgcaagagcagcagcagcagcagcagaagaagcagcagcagcaggctgcagccgcgggcggccgcagcggcggcagtagcagcagccgcgccgccagggccgccgccaatgccgtgcaggctgtacagatcgggctgcatgacacactggaggcgctggctgtggcgtacggcgatctgggcgagtccgacgtggcggcggcggcgcgggcggggctgctgctgtgtcccgtgacggcggcggcgctggcggcggaggcggcggggcggccgcggctggcggtgcggcggctggggcaggcgcaggcggcggcggagatggtgcaggagctgggccctgtcgcggcggcggggctgcccgtgcccgagcggccgcaggacttggcgccggccggcgccgtgactgctgcttcggcagatgccgccgccgccgccgccgccgcgggtggcactgtcggcgaggttactgtggcggacctccttggctctcaggccctggcggctgcagccaccactgcagcagcagcagcagcagcagcagtagctggcgctggcaatggcagtggcggtggcggcaaagatgtgggcggcacaagtggcggcggccgcacaggtggtggcggcggtcaggggttggcggcggcgccgccggccgagtcacggctgtggcggcaggtggtggtgcgatgcgcggacgcgctgggcgactggcagcgcgtggagacggagctggaggcgcccgtgcaggagctgcttggggcagcgggggccgccggggccgctgccgggggcgtcggcgccgcttcctcatccacctcgggggcaggcctgttcacgggagctgacgcggcgccgccggacctgctggcagcagccctggtgcgcggcctggcccgcggcagtagcagcagcgcaggcggcggcgttaacggcaacggcagtagcggcggcgccgccggctcggcggagctgctgcggcgtgcgctgcgtgcggcgctgttccagcttcgtgagtccgacgtagcgccgtcgggccatgggctgggcgccatcatcggcggcggcggcggcggcggcggcggggatgtcatgatggcagatgctgctacagccagtgacggcggttcgcatgccgccatcgcggcctggattgaggcgctgttggagcggctggatggctcgcaggcggcggcggcggcagcagcggaggcggcggcgccgctggagctggtggcggcggcggtggtgcgtgcgtgccgccagggcagctgggagcgatgtctgggggaggtgcagtcggctctggcccggctgcgctcgcgctgggccggcctgcacccgttgtcagccgccgcccgcgtcgccgcgctgtcgctgctacagccactggcggagatcagcgaggccgtgcggcaggtgctacagccgaccgcggcggctgcggcggctgcctacggcttacccgctggttcgttgcggctaagtggcggcggcggcggcggcagtagcagggcagcagcggctgtagcacctgggcatgcgcgcggggcggcggggccgctggcggagctgaggggcttggtggcgcgctggcggcggcgtggcctggggctggcggtggcggcggacggcggcggcggcggcgcgggcgccactgcggccggcagcgacctcatgtccgtgctgcacgtgcgccgtttgctgctgctggccgctggcacccgccgccccgcgaccgcgacgccgtccggcgcggcgacagagcctgctgcagccgccgccgcccgggcactgcaggccgccgcccgcgccgccgccgccgccaccgtgtttgacgccgcggcggctgcgctgaggtccgggtgtgtggacacggcggccgaggccttgcccgacttcgccgtgggtgacgaggaggtggtcgaggtggtggagggagctacggccgcggcagagggcgcggacggggcagcggcggaacggcgggcgcgacagcgggcgcgggcgcggctgcggctgtttacggcgcacaccgacgcggctgtggcgcaggcggcggcggcggaggctgccggcagcggcggctggatcggcagtagcagcagcggcagtagcagcgatgttggcggcactggcggcctgtcgggttatgattggcgtgtgtatgagggactgaatgggctgctggcggcgctgaggccgtggctcaagggcgcgacggtggcggcgacggcggtgccggtgctgggtccggggcaggtggcggcagcggagctggcacagtcgcgggcgctgctggcgtgggcggccaaccccgccgagccgcagtacctgaccgcccgtgtgggcgctgccctgttgagcggcgccacagcggccgcagccgccggcgccaacctgcagtcacagctgcagcggcggcggcagcagcagcagccgtccagcccagccccgcattcgcagcagccgctgcagttggtgctacagccgcacgctggcccccgcgagacggcagcggcgttgctggcggcgcgcgcctccgcccacttcgccttcatgtgcggccgcctgttgcgagcccacgacgccaccaccgccgccactgctactgccgctgcagctgacaatgctacagccgccaccggcagcggcagtagcaccggtgaccccggcatgccgccgctgaccgcgctgccggccaaggtgctggaccgcgcgctgcgtgccggcggcagtagcactggcaccagaggtgctgctgctactgccactgcggctgctgctgctactgccgcggcggctggcgagctggccggctgcctagtgaggcacctgctccgggcgatggccctggccggcagcgccccggtgacggcgggcggctgggtcctggggggtgaggggggcgagggcgaggctgtagcagccggcaggcacggcagtagcagcagccagcatgacggcgatggcggcggcgatggcgatggcgagggtggtggtgatggtgacgatgggtgcggcgggggcggtgtgccggaggtgcggctgcacgtgccggtggtgctgagtgtgctgcgagacggctggggcggcagtagcagcggcagcagcggcggcggcggcagtagcatctgcggtggtgtcgacacgacggcggcggcagcagccgcattccgtgagggctggtcggacgtgccgctgggctgcttcctgccgtgggcggggcagatgtgctccatgctggcggatctggattcagcgagtgcgggccggtcatctggatccggctccgacccgagtgcttcagatccagatccggatccagttttaggcccgctgactgcgctgtcgtacgcctaccctcagctgctgcacgcgccgctgcgcatgagcgcggcgggctttgcttcggccggcagcggcagtagcagtagcaatagcagtagcggcagtagcagcggcggcagggctgcggcagctgtagccccgctgctggctgccacggccagcccggtgctggagggcttcatcgacgccctggacgcagccacctacccggcacagaggtggcaggtgtttgtgtcgcgcatccgcggcgccctgcagcgcggcgggctggacgcagccgtgcgcgtgtggacacacgaggcctggcccaacctcttcggccgcttcctgccacacggcgcagccgccgccgccacagccgccgccgctggcgcaccgcaccgcgcgcagcgcgccacccgccgcgtggcggcggacggcggcgccgccgccggcggcgccgccggcgccatggcggctggcgacaccgtcaatgcggccttcgccgcccgctaccgcgccgcgtttgaggctcagttgggcggcgccgacggcggcgagctggcggcgctggcggcggcgatgcggcgggagcacgcggcggcgcggcgggcggcggcggaggggcggctgagcccggaaggagcggcggcggcgggcggcggggcgcggacgcgggaggctcggctggcgggcatgtcggagcagcaggcggtgtgtgcggccttcgacggcgcggtgcggaagatcatgaccacatgcatgcagcgcgggggcggcggcggaggaggaggtgggggaggaagcagctcgtgggaggcgctgcaggcggcggggccgcagccgctgtcctggttcagcccctggttcggagcctaccagcgcgcggcggaggacgcggcgacccaggcggcggcggcggcagtgacacccggcggcggtggcggcaacaggctgctccaccgcacgcagctgctgctgcccaccatggccttccccaccgccgccgcgccgccgccaccgcacggcacgccgccaccgccaccgcatgcacgcacccaccgcccctcccaccacccccaccaccacccgccccttcctgcgctgggctgtgaggacgtggcgccggtgctggtcactggcttcggccgcgacgtcaacgtgttcggcagcaagcagcggcccaagcaaatgacaatgttctgcagcgacctgagccgccgcacctggctgtccaagggcggcgaggacgtgcgactggacgagcggctgcagcgcctgttcgacgtcatgaacggactgcagcgccagcagccggcctgctaccggcggggcctgcgtgtgtcggtgtttgcggtggtgcctctgagcgcgagtgtgggtttgctggagttcgtgcccggcactcgcccgctgcagagcgtgctgctgggcgggccgggcgcgccgcgggacccggacgccggcgcgcgtgtggctctggcgtgtttcgtgtgtccgcccgccggcgtcccccccgaggttggcggctggacccgcggctacgaggccatgtacggagccatggggccggggcagcgcgcggagccggcggcggcgcgggaggcgtttagaaaggccgccggcgctctgcctccctgcctcctgcgctccgcgctgcttcgctcctgcggcggcggtcccgagctgttcctggcccggcggcggcgcctggcctccagcctggctgcgggcgccgccgccggctacctggcgggtgtgggcgaccgccacgccgacaacgtgctgctgcaggccgccaccggggagctggtgcacatcgacttcgggtacagcttcggcgcgggcacgcaggtggtgcccatccccgagctggtgcccttccgcctcacgccgcagctgcaggccgcgctggcgccggccgccgccgccgccgtgctggagccggcgctggcggcggcgctggcggcactcagcgggcccagcgcgcggcagctgctgggggcggtcatggaggtgttcctgcgtgagccagtggcggagtggcagcacgaggcggcgatcctgcgcagtctgcaggagtcagcggcggcggcgcaggcggcggcggcggcgcggcagcggcgcaaggggcaggagcggcaggagggcgcggaagcggaggtggaggacagcagcagtggcagtagcagtggcagtagcggaggtctggtgctcacggacgatgcgggaaccaacagcagcgaagcgccggcggcggagctggcccgggcaagggtgtccacggcgctccagaagctggcccggcgccacccctcgctcatcaccgcggacgagctgcggcccgtgcacggcgcccggccctactacgcagccctgtgcgccgcggtggcggggggggcggcggcggaccaggcaggcggcggcgggggcggcagcgtgcgcgcgcggctgctgcagcaggggcccctgctgggtgcgggtggcgcggggggtccgctgctgctgagcccgctgctgcaggcgcgctgcctgctggaggcggccaccgaccccaacctgctggcgcggacctacctggggtggaagccctacctgtag

SEQ ID NO: 120 - DNA, 1794 bp, Chlamydomonas reinhardtii
atgcgagctcttggctctggcgtaccgcgggtggctcgggccggtgtggccaggggcccggcaccgctgaattccttttggcgttcttacggctggggcgctgaaaagacgaaggaatctcagtttacttttgacgaccaccaagcgatcttcgagggccgcaccacgccggacctgctcaagtcgctgctcgtgctgcggctgtgctccacgccctccttcgtggcctcggcggagggcctgctcgccaatgcccggcgtgtgatgggcgacagcaccgccctcagcttcgtgcgcaccaccttttaccagcatttcgtggccggcaaggactcgggcgacgtatggggccgcatgaacacgctgcgtgcgaacggcgtgggcgctatcctggactatgccgaagaggaggacctgctcaccgcctgcaagcagcccgcgccgcccgccaccaaggcgtcggctggcgcggctgcgggcggcgcggcgcaggtgtctgcccgcgaccccctgggcggcgagtcgctgattgagtcgggtgtggcagcgaggacgtacacgttccaggacgacgccacgtgcgagttgcgcacacaggccttcctggcggccattgacaccgccgccacactgcccggccagggcttcgcggccatcaagctcacagccctgggggaccccgcgctgctggagctcctggcctcggctctggacgcagtgaaggccctgtttcggcgctatgacagcaacggtgacggctttgtcacgcggcagggcttcctggaggccttcgagcgcatcgagaaggcgcagggccgcagcagcacaggggcggagcgcaacgagatgtgggcatggctggacccggccggcgacggccgcgtcgactacgtgacctgggccagccgcctggacctacgccgcctgcctgacatggccgccagccttaggcaggagctggagtcgcagaccgacgcccgtggacggcagtgggagatgtcggctgaggagctgcggcagctcgaggcgctgtttgggcggctgcagcggctggtggcgcaggccgtcaagaagggcgtcaagctgatgattgacgcggagcagagccacctgcgccccgccatcgaccacatcggccgcgagctgatgcgcgagcacaacaagcccgtcagtgcgggcggcgagggcgccgtcatcttcatgagctaccaatcctacctgcgcgacgtggagctgcgcctgcagcgagacctggagcgggcggagcggcagggatacgtgctgggggccaagctggtgcggggcgcctacctgcacctggagcgccgccgcgcagcccaggccggcaccgcctcgcctgtgtgggaccacatgagggagaccaccgccgccttcgacggctgcctggacacgctgctgcgcggggtgcaggcggggcgggcggagctgatggtgggcacgcacaaccgcagcagcgtggagggcgtcatcgagcgcatgaacaagctgggcctggagccggaggaggcgcatgtgtacttcggccagctcctgggcatggccgacaacatcagcttcacgctgggacagcacggctacaaggtgttcaagtactgcccctatggccaggtggacaaggtgatcccctacctcatgcgtcgcattaacgaggcgcagtacacacgcaagggcggcaaggaggacgcggcgctgcttctggaggagctgatgcggcggctgcgcgacccggcgcactcgcccatcgcgcgcatcttcagcaccgcctcctcctaa

SEQ ID NO: 121 - DNA, 2478 bp, Chlamydomonas reinhardtii
atggactatccaccgctgcaacaggcgcctggatttgacctggccacggatgacagcgggcgagaccccaacatccctggctccttcgccgcagtggtcgtcaagcggtctgccaacctgcaagaggtctgcttgccgccggcctacgtgcccaatgcgaccctgggcacctggactcggcccacggagctgccggcagggaagcagatcacctactcgaccaacaccacgatcgtgttgctgcaccccaactgcactggtattggttttgacatgccgtacgaggagcagtgcatcaaatcttcgggaggcacgtttgtggatgtgggcgtgtactgctactcattggacccttttggaaaccaggttaaaaccggctacgtgtcgcacctgctggatagcgtgaaccggtgctaccagtacatgaccgtgggctgcattgatacgtacggcggtgtactcggctgctacaatttcatgatgcaacagcgccaaaacaataacagcagcagctcgccgcgccaggcagtgccgccaccaccgctggctcctgcaatgaccggcgtgggcgggcgcagcaaccagcaagcagccctcatcggcgctattgtgggcggcgtggtgggaggcatcgtgctcgtggccggcgtcgcgtgggccaccctgctgctggtgcgccgccgccgttatgcggaggcgccggcggcggcagcgtctggcagccggcacaagagcagtgacgacggcgagagcgggggcagcagtagcagctgtagcggcaagagcggcggcggcagtgaccctgttgaagctgcagcgaagccttgcaacccaacgtacgcctttagcggtggcagcggccctgagcacgccgccgccttgccgacagcagtggctagccatttacccactcagcagcagggcaaggaggaaaaggaggaggaagcggtggcggccagccatttacccgctcagcagcacggcaaggaagatgaggaggcggtggcggcggcagcagcggtggcggcggcggcggtagcggcggcgcctctttttgctgatgagccggcctcgctcgtgcctgtgacgcccttgacccctctgcagccccacatccctctcggtgtcacggtctgtgagggcggcagcaccctcgctgcagcaagcaggagcaacagcaacagcatcagtcttggcatccatggtgacagtaagagggcccccgtaagtggcggcggaccaagtggcggggctctcggcggctgcggcaccagcggcagtactgatgctgacagccgcgcactcgtgttcaagggtggcgaaatagcagcagcagcagtagtcggcgggagctcggtagtgccagcggcggcggcggccggtgtgacgaccagcagcggcggcggcggtggtcaaagcggcgacgcggccccaccagcaccgagctcagatgctgcgacacgtgctagcggcggcggcggcggcggtgcgccagcacatgtggtgctgaccggcgtcgtgatgggcaaaggctcatttggcagggtggttgagggtgtgtactgcggcaggcgggtagccgtgaagcagatttacacgggtatcctcatgcaacaggggacacagcagctacggcagcagctgctgacacagcagcagtcgcagcaggcacagcaggcacagcaggcgcaggaggcgcgggaggcgcagcagcagcatcttcaggatgtgcaggacagccttatcgcggcgttggagcaggaggtgcaggtgctggccagggtgcagcacgagaacatcgtgaccctgttggccgcaaacctcgagccgccgaacgtgtgcctggtgatggagcggatggacacgtcactggaccacctgctatacaaggaccccaacagacccttccccctgtcgctggcagtgcacatcgcgctgcaggtggcacgtgccctggcgtacctgcaccccaccatcctccatcgagacctgaagccggggaacgtgctcatctccaacgcggatgacacggcggctgcggccgacccgcacaaccaccagcacgttgttgtcaaactggcggacttcggcctgtcgcggctgcttgaaacggtccttgtcacgcaagagcccgaagtcggcacggcaccctacatggcgccggagtgctttgacctccagaacattgtcatcacagaccgtgcggactgctactcgtttggagtgctgctgtgggagctggttgcgcggcggcagccctggtcgaaacaaaatatgatgcaggtggcggtggcggtggcggtgaacaacgaccgactgcccctgctgcccctcgttgaggccggtgcgccgcccaagctgcagcggcttgtgacacagtgcttcgacgccgatccgcagaggcggccggcggcggctgagctggtgaaggagctgctgctggtgcagcagcagttggcttctgggtcgactgcataa

SEQ ID NO: 122 - DNA, 2166 bp, Chlamydomonas reinhardtii
atgttcggggaccccagctcagcatgcagtaccgatgttacaaacacgtggacagggaccgtgtgtaacggcacagcatggtacggcgtgggctgcacgggagacggatcggccgtgattaacaacacgggcttcgtggagtcgctactgctgccgaactgcttccctggaggagtcggggtcgcggcgtcgctgccatctcaggtctcggtcctgacggctctgacgcggctggacctcacgggcaacaagttgagccccaacagcggcctaccagcggactactctgccctgaccggtctgcgcctagtgggcctggcgtccatggatctggaggcgggcccggtgccctccagcgggttcccacaagagtggtcctcgcttgtcaacctgcagcagctcgacctgtccaacaaccggtatcttggtggcgagttgccgcaatcgtggacgaacatggcagcaatcgtcagcatagacgtgtcgaacacgggggcttgcggcacaatcccgggcggcctgagcagccaggtgacgccctcaggcctaccttcgtcctgtgagctggtgaactgtcggcgctacttagtggaaacgctgcagcccatgatcgacagccaggttcagcccggctcggcctgcaacctcaccagcgcgtggcccagcagcttgagcattgactcgtgggccggcattacggcaatgattacggtcgttggtacaacgcccgtttctgacgtcatcggtttcgtgctgaacggttgctatgcgagcaacggcaactccttcaacgtggtgttgccggacggcttgtcatgcttcggcagcctcacgcagctgctgttcaatggcaacaatgcagcaggccccctgccggacgcgtggacccagctaaatcagctgcaggagctttgggtgaccgacaacatcctgaccggcagcctgccggcatcctactccgcgctcacggggctcacgacattgaagcttcaccaaaaccagtttaccaacacgctaccgcctgagtggcaggccatgagcctgctcgcagacatcagcatcagcgacaacacccaactgagcggggccgtgccttctgcatggggcaacctcaccagcctcaccaccttcagggcgcggaccgtgggggttggtggccagctgccgccctcattcagcgccctgtcgcttctgacggagctcacgttcgtgtcggacaccctgagcggctcgctgccgagcgagtggagcacactgtccttgctccagcagctgaccatcacttccaaccgagccacgtccacgatgacgggcacgattcccaacgcttggtttgggcccggtggcattaccccttccatgtcgtcgcttcaggccatcacgatcagcaacaccgcaatttcggggcccctccccaccgacatgtcgcaaattttcagcctcacaaaactagacttctccgccaacaagctcaccggcggcccgacaccgtcgtctggatttctgttcgagtacaatacgctgcaaaacctgcagttgattagtcttgccagcaaccaatacctgggcggaaccgtgccatcggcctgggcagttacgatgtccagccttacatttcttgacctccaggacacgggagtgtgcgcgcccttcccgacgggtttgaacagcgcattaacacccggcacgtttgtcaactcgtattgcgaacttggcttcatgaaccagctcacgcgcatggacctgtcctgcatgaactccttgcgcacgctgaacctcggcggcatggacaagctcacagggccgcttccggaaacgctgatctccatcccgggcctcgctgatgtgacgattgagagtaactcccttacgggcacgttgcctgctgtatgggataacctgtttgcactcacaagtcttgtgattggtgcgggcggcaactcggcacccgggccaagtgtcaacggcacctttccgcagaactggttcaccagcggcaacctgaacaacctctggaacctgcgcatagcgaacacgaaggtgtccgggccgctgccggatcctggcagtaccttccaagccggctttatgggtctgacttctctggacctcagttccaacatgctcagtggaaccctgcccgactcgtaccagggcttctcgtaa

SEQ ID NO: 123 - DNA, 1146 bp, Chlamydomonas reinhardtii
atgcaggaggtactagctgcagcgcgagcatcgaagcaggtggcggagtacgcggaagcatcgcgtgtgagggtggttgatggctggggcgacggcctgcctgcggccatggcggctgcggttcaggcccgcggtggcggcctggtccgactgagagtgcgtcaggaccacgaggtggtgcagcgccagcgccgcagctggcgcgctcgagcggcacttgtggaagcgctggggattgagcggtatgacaacccaagctcagcggccaagctggtcctgctccaggcgaaacctggtgctgtgcttgcggacgtgtcgccgggggagcacatgtgcatggtgctgagcgcgctgctggggctactggcgtgcccagacctggaggatcaggtgtacaacgaaatcgcaggtctgcttgcgggcgtggagctggaccacggacgggcactgcgtcagcgcattggcgggaagctgcgtgaggcggtcgaggtgctggaggaatacgtggctcacctccggtcaatctcggacagcgcgcagctcccaaaagctgagcatgagctgcggcgggcacaggaagcgctggagatgttggcggcacccgccgacacagacgacagcatgctggaggtggacaccgttaaggtggtcgtggacatcatgactgggctggacgttaacgtcctcgtagtaagcctggtcgaccagcaggacctgggcgggcacgtcactgcagcgtacagccggaccacgcatgtggcgctgcgcgagctggcggtctcgggcggtggcgccctggagctgccctcatgcagcactgtagtgctgttttttgcgcacaatcatgcaaactccgttctgctgggcaaggtgggcgaccagaagacggaggtggaggtgctgctggacatggccgcggagacgcacgaatggaggcagggcggcgttgtgtcactcggcagcggtggcgcaattggagcagcggcagtacagcgcgggtctgcggctggctcgtttgtgcagccgcagtctgctgaggttttgcacaggttcgtgccaacttttgttccttgcgcttctgtcctgcagcgcgcggcacaatgggtgcagctcaacgaggcgtgcgtaggtataccccagacttag

SEQ ID NO: 124 - DNA, 3489 bp, Chlamydomonas reinhardtii
atggcctgcaagggctacgccacccagccccccgtgcaagtccggctgggcggcctgcgcaccgaggctgacggcacgctggtgaacctggaggcaccggagaacatgaacaagtccggcctcacaattgcgggtcgcacagtgacgatgtcggacaacggcctggcagtgttccagaacacacgccttcgtgcgcccgagggcccgcgcgtgctggagctgaacgccacgctgacgaagcccgtgcgcgagctggccagcgtcaaggtgctggtgtacgtgcggccctgcaccattggcgagttcctggaccccaccacaaaggacatgtgcattggctgcccgctgggcacctacaacatgatgccagccgcgacccagtgcgagacctgcccggacagcaccaactgcacggcccctgatgagggcgccatgatgctgcccgatgacggctactggcagagcaacctgtactcggagcaggtgctggagtgccccaaccccgactcctgcacgtacgacgcccgcgaggactcgctgcgtgagatccaggcggtgacgtggtgggcggtcaagtggatgcagggcaacgcctcacagcgcgcctccatgaacacactggcggaccaaaagtggaaagacctccttggccggcgccagcttcgaacgctgggggccaacgtggacgtggtgaagcccattgagacaatgagcgatgaagagttcgtgaacgcggtgtacaacctgacgtatgtttacaaccagaactacaccaccaccctgtgcgctgagggctacatgggcacgctatgcggcgcctgccagcccggctggggcctggtggacgaggccagctgcatcaagtgccccgccaagtccctcaacgacctgtactacgccctcgccaccatcttcaccatcttcaccatcggcatgacagtgctcagcagcctggaggcgcagaagaccgcgcgcgacattcgcgaccacggcctggacgtggcggaggtgcagcagcacaccgagaggctgcaccagctggaccccgcgggccagggctggcacggccaaacctcgctgaaccccgtgcgcgactccgtgggccctgttgatggcagccgcccgggcagccgcgccgccagcgtcaccgccggccccagctcgggcacgcagctgccccccgccgccgagggccccaacggcagcaagagccccctccgccccggccccgtggcggaagccaccgagaccgacggcggcgcgcccgctcccaccccgccgcccgccgcctcactgccaccggccgcgcaccagcaggccggcggcagcgccaccaacggctccggcgccttgaacgtcggtgctgtcgcgctcctgtttgacgggcagcaggcagacgctcacaagcccaagcccgacatcgcatctgccggcggcttggcgtccagcttccgacccgacaagagcggctacagtgcaaccgccggtgccagcggcacacagcgccagggctctgtgcagggaggcgtcaacgcgtcgggccgcctgccgtccaccaaggaggcgtacagcaagtaccaagggctgacggagtacgagattgacgagctcaagcgcgcggaggaggaaatgagggaggaggcgctcaaccgatacgctgccaaccagtccacaatcatgcgcatcttcatcagctacatccaggtgctggcgctgctgcgcaacgtgcccatccgctaccctgacgcctacaacaactacctcaaactcaacaaccaggccaccgcctacccaggagacatcgtcaccatggactgctcgctgccctacttcgcagccggcggcctgccgaggtccatgctcaaggtcatcctgagctgcgcctcgcctctctacatcctgttgggcttcgccatcctgacgcttttcggcgacatggccatctactacaagaagcggaagtcgcgggccaagctgatgaaggcgaccaagaagcgcgggatgagcggcaaaggcgtgccgctgggcgagagcgtggagggtcccgagccctacgccgccgccatcaccactaccacttccaacaataacaacggcttcaccaccgtgaatacctttgcccgaacaaagacctccggctccgccacggcggccggcggcgctagcagcctgcctgtcgccaacagctttgcacccggcggcgcccagcctgtgtatggcttcaactctggggccctgttcttcggcctggtcaaggacaactactgccccacgggccgggacgacccactgcgcaactacggcgcattcctgtgggaccgttacttctcacaggttctggttatgatgattgtcatcttctttgttctgtacccggacgtggtggacaacctgctcagcatcttctcgtgcgctgacgtggacttcgacaaggacggcaaccccctggcggtcaagatgggtctgtacaacaagcaggtctggacggtggactacaacgtcacttgctacgagggacagcactttgtgttggccatggcgctgggcatccccgggatcatcctgttcgctgcgggctggccctccatcaacgccgtgctgatgagcccgctgggccgccagctgtgcggccacaagacgcgtttcactgaggacatgaccgagtactacctgaacgactacaagcccaactttatctggtgggagtcccttgtgatgctgcgcaagctggccatcgcgctggcgaccaccttcctgggtagccgcgataccgacaccggcctcaacctgctcatctgcatgtccatcctggtggtggctgtgtcgctgcagctgtggttccggccctatcaccatgtggagaccaacacgctggaggccggctccatctgcgtgctgctgctgacgctgtacctgtcgctctacttcctgctggacgcgagcgtggtcagcaacagtggagccatcgccgtgtctgcggtcatcatcggcatcaacgtcgccatggtggccatcttcctgtactacgtcatgcgctcccactggcacacctacatcaaggacatgggcttcgatgcggaggtgcttcacggcatgtcgcgggcccagatccaccagcacatgtccaaggccatggatgacgcgctgcccagctttgtgccagagagcgtcaagtccgtcatcacgcgcgccgccacaggcacgttggcacacacggtggcccttcagaagcgcttctcctcacccgccagcctcaccgtcggcacctcggccgccacaatgggcacacacatctccggcccgctcagcccgaactcgccgtctggcgccaacggctctggcagtcccaaagtggggaccgtgaactcccttggccggccgcagcagcagggccagcccgaccgcgtgaacacgctggggcgcggcaaggaggaggcgaagcccaagcaaagcatcaaccccattgacaggctgaagtcgaacaagtag

SEQ ID NO: 125 - DNA, 714 bp, Chlamydomonas reinhardtii
atgatgaaccgaaaagcttggcataggatggtgcggcaagtggaggtgaagaaggccattccaaagccaaaagagatgacctgggacgttgtactagacctcgcaaacgatggacaggagcaccatgaaggtagtaacaagctaacagcagaagacctcgtccgtatcaggactgcgctgcacatgctggggaaagacgagccagagcatggcaaaacggaaatggataagatcgcgccggatgccgtggagttcaagttgttcaacaaggccaccatggaccgcggagacctggtggccttcctcttcatcatgggagtgagcgccacggaggacgcactgcatgcggagctgcgctacctcaagctcacgagcgacctcatcacgccggcgcaggccgtcttcgtgtggatggagatgaaggacgacgaaaaggatgaagacgctatcctcaagcgcgcgttcatgttctttgacaaagacggcaacggcgagatctctgggcaggagctgcggcaggccatgggcgacgtgggcaacatgctcacgggggccgagatcgacgagttcatggagctgatggaccgcaacggtgacggtgtggtgggctacaacgagttctttgaggtgctcacgaagcagaccgacctgggccaggtgctcaacgacgtcaagaagctggacaaggacatccaggacatgttcaattcttag

SEQ ID NO: 126 - DNA, 1227 bp, Chlamydomonas reinhardtii
atgtttggacgttttcgaggcttcagggaccgcctcaaaaagcgtggccatcatgtcgaagaagagttgacgctagaaaactcaaatttgacatcggcacaaatagcgacggccctgaaggccctcaaaattctagggctcgagcccaagaagcagcagctgaacaagcaggacttcatcgtgtttctgtatgctatgggcctgaaccccacggacgacatcattgactccaaagtccgcgccttcaaactgcaccacaagaagacattcacgtttgggcagctggcgcacgtatggtattccatgctgcaggacctgacggatgaggacgagattctcaaacgcgccttccagttctttgacaaggacggcaacggcgagatcagcgtgcaggagttgaagaccacgatgcacgagctgggcgacttgctgagtgaggaggagatcgcggccttcatggcgatcatggatgtcaacaacgacggagtgattgggtacacggagttcctggccacgctgaagacgcaggcgcccgagctgtcgggcgacaaccacaagctcaagacggcaatggagggagacaggagtgtcgcgggcggcctcatgcgcgccgacgcccgccactatgaagacccgggcctgccgctggcgggcgccgggcccagcagcccacacgacacactgctagcggcggcggcggcgctgtcgccgtcagcccaccactcacccgccgggacacacaccgggctcgcgcatccggcgaaccaggcgcacccgcagcagcagcagcagcagcagcagcagcagcagcagcagcagagcctcaaccggcgacaccatcccgaactagaagaggcggctgtgcaaggcggccgggagggaggcctcaaccgcgggagcgagggcgagggcgtggggataccggaaccgtccgtagcggcggggatagggccgggcgcggtcggcgccagcaccggccggggcagcggcagcggcgaaggcagtgcgggcggcgcagggccaggctcgccgcggcgacaggcgtcgctgcgggaggcacaagcggcagaggcgcgaggcacagcggcgacgacagcggcgatggcggcggcgctgcagcggccgagcagcagcagtacgcgggacggggcggcgcttccgccgtcgtcaccgccgggcgtaggcgctgcgccgctggagcgcagtgggtccaaccacagcaggtag

SEQ ID NO: 127 - DNA, 3321 bp, Chlamydomonas reinhardtii
atggagaaatatgagttcctcagccggacaggagagggggcgtatgggtcggtatggcgtgcccgggacaagaacacgggcatgatggtggctgtgaagaagatgaaggacgtgcctaccacagaagaggaaggggaaatcgccatgcgggaggtccgtgtgctgcagctggcgaaacacgtgaacatcgtcaacctgctggaggcatataagagtcagagtgggcgcctgtaccttgtattcgagtatgtggagcgcacgctacttcaagagctgaaagccaaccgcggcggcatgccgcccgctgctgtcaagtcgttgacatggcagctgctgcagtcgctctcatacctgcaccggaagcagatcattcatcgagatgtcaagccgtcaaatatcctgattacggagagcggcgtcctgaagatttgcgacttcggatttgcgcgcgccatgaccagctcctccgcggacccagcctacaccacgtacgtggtcacgcgctggtaccgcgcgccggaagtgcttgtgggcgacaactacgggccgcctgtggacgtgtgggcgctgggctgcatcttcgctgagatgttggcgggccggccactgttcccgggcaagaatcatcacgaccagctgtggctaattctcaagtgcctgggcaccatgacggagcggcagctggagctgctggactcggacccgcagtttgcgtgcttcaggcttcccacgcaatcggagatcgagccgctggagcacaggctgagcgcactgagtggaccggcgatgcagtttttacgggcgtgccttaacccggaccccaagcagcgcgccaccgcagacgagctgttggccatgccgtacttttcgggtgtcacggacgtgctgccggtggacgacctcatggcatacccggacgccgacctgcgcgcaaagctggaaaaggcggtggcgcaagacgccgcggccgctgcagcagcagcgcagcgggagtccttgctgttgatgcccagcaccagcaagcgcggggtgctggcgcccactaacagcaagcagcacatgaacccgcacatgaacggccaggccgtgtcacccggccgcaatggctcgggtttgccgctggtgcaccaccagcagcagcagcagccgctgctccagccgcacagcagccagcccatggtgggtccgctcccatccaaggccgccagtgtgcagcagctgtcggcagtgcacatgacggaagcgcggccgccgctgcagcggtacattacggcgccggcgggcagcatcgccagcaaggtcatgtcgcagccgccgccgctgcagccgctgtcgcaacacggcggctactcgcaggtgccgcagccgcagcagcgctcccgcccgagctcgggtggcggtaacaacagccagcagccttcgccgtcgggcagcagcacaagcaaggcgtcgtcgcagcagcaggtggggccaccggggccggtgcgggatgagcgtgaccgcgagcgcgaacgggcgccggcgccgtccgggaacgcgctggtgccctcaggcatgaacggcatggggcttggcagcggactgcccatgcggcccacgcgcggcacgtggcgattcagcggggacggcgaggcgggtctgcctcccaccatcactcgccagctgtcgggcacggtgaatttccagacctacagcggtgcagcagctggcggcgggggcgcggcaatggagcaggggcgcggggggccggaccacgtgacgccctccctgcgtgcaccgcagcagcgcaccacgtggaatggcgctgcgtcagctgcgcagccgtcgcaacgaagcggagccagcaacggcggaggcagcaacaacaacagtaccagcggtcaggaccagggccagtcgcgcagctcgagcatgaacgggcaggagcagggcagcagcactgctgcgcaccgcaaggcgcacagcctcgcgggcaacgaggggctgcacgtgaacggcgggggcggcggtagcgcgacgctgcgcaacggcgtcgcgcctggcggtctgactgggctccaaggccgcagcctggccccggcgccagctagctccagcgggcagtcacaggccacgcacccgggcttcccatccgcaaacgcagctgtgcggctcagcccctcgccgccgcccggtagctatggtggcccgctgcggtccaccaactcagcgtcgctggtgcagccagccgcgcaggcctcacagggtcgcggcagccacgacggcatgggcaacggcccctcgggtcagctgctactgggcccgtctgtccacggcatctccatcgtgtctggcggtgggggcggcggcaagacatccaacagcggctttctgccgcagcccgggtatcccgggagcacctccagcatgcacgccggcggcctgctggagccggaggcgtcggactcgagctgctacgcagatgcctctgcctacctgaacgacggccggcgtgcgtcagacacagtgctgtacgcggcggccgccctaaaagaggcgaagcataggcttgacaaggcgtcaaacatgatctcagggaccagtcggccgccagggctgctggacggcgtgccggtcgctaacggcggggcggtgggcggcacacttgacgggggcagccgcagcgtggggctaggggtgctgcgcgcgccttcgtttggcaggacgtctgggccgcccacgggcattccgaacggcccgccgtctccagacaccgtcttgccatccaacctgccgccgctgatgggcggcacgccgcgccgcatctcggcgcccgagtcctccaccacgtcgggagcgctggcggcgttgaacaacgctaccaacggcggcggcaccggcgcgttaggcgcaggcagtggcagcaacagtagccgcgcgctcatgggcagcagccacccaccgagcggtggcggctacctgcagcggcacaacaacaagcaacaacatcagcagagccagcagcagcaggcaaacctgcatggccaagcattggcgcagctgccgagcatgggcagcggcgatagcgacgagggggcccaggctgccaacattagtagcaatggtgcctcccatgggaccttcctgcctgcgctggaggtcgggaagccgggcagccgcataccgtctgcatccctggggtccacgtccggtgtgggcgtgggccgtcggccaagcaagggctcgctgcgctctgtgggcccggaagcggcccactgcaagcgtgaggaggccatgaaggcgcttgccctggaggcggtgccggaggccggcgttttatga

SEQ ID NO: 128 - DNA, 1359 bp, Chlamydomonas reinhardtii
atgtcggccaatcgtcgcagcactaatagtaattctgcatctggggcgcggaacggtgctcgaacgagcagctccgcggacaatgtgaagaagtgggtcgcggaggacactcgagaggagggcaaggctgtttttaaagcacacgtcaaggagacaagcaacttggatgttctatctcggtgcaagaagctcaacgagcttttaagcagcgacgtgctcaaaggcaaaggggactccaaggagcagctgaaggagattctgggcattttgcactcgggaccaaagcggccctcctttctggacaaaccgccggtgacggcaactgcaggcaagcggccggtgccggcgcaagcagcgcagcctgttgcagcagggccttctggacaccttgatgcggatgcgctgatgcggctgttggactcggaggacgcggaccaggcggcgagggcgagcccaccttccacctcgcgcaccggacaacctcaaacggcggggccgccagcagaggacgttgacgacctcatcaacctgctcaatgacgcctcgccggcacccggcaacggcgcattgccggtgcagcaaaagcagcagcgggagcgggaggaggccgagcggcagcggagaataaaggaggcgcaggaggaggcggagcggcaccgcaaagccaaggaggaggcggagcggcagtggaaagtgcaggaagaggcagagcgccagcgaaaagcactggaggacgaggctaaggctgaggcgcagcgcatggatcggatgcggcggggcgcagcggtgtgcatccaagctgcctggcgtgggcactgcgctcgccgcctagcagcggtacggaggaagcagcgcgctgaacagcgggcggcagaggtgcttcaagcggcctggcgagcacggggcgctgcgcgggagcatcgtgcgcgccttgccgcggcggcggcgctgcaggcggctgtgcgggcgtggcaggcgcgacgggcgctgcagcggctgcgcgtgcaggagttccggcggcagcacgcggcgcggcttatccagcgggcgtaccgctactaccgctacacacgcggatacacgttggggccgctgagggtgccgccgcagggtggcccgcggcccggctccggatcgggtgtggacggcgcggccttgctggcgaagcagctgcggctgcgcagcgcggtggacgcacggctagcgcccgagacgccacaacaagcgcagggggacgacgatgcctcgcagcaccgcacagtggccacgcaccgtgagcgcgtgcggcaggacccggcagccagctgccgcccacgcaacgtgtgtcgtgcggcggtgacggcggagggcggccgttga

SEQ ID NO: 129 - DNA, 660 bp, Chlamydomonas reinhardtii
atgccgctagtatatgtaagcgtatgccagggctctgtggcgctcgcggagtatgcgggcttccaaggcaactttgcggtggttgctcgcgattatctggacaaagccaccaagctggagggcaagagccgatacgaggttgatggccactccctgaacttcctcaatcgcggcggattcacctatctggtgatagccagtgtggacagcggcgtggcgctgccctccgccttcctggacaaagtggaggcagagttccgggccaagtacggcgccgggctgcagctgggcgcggcggccggctcgctgaacgccacattcggcaagcagcttaagcagttgacggagaacgccacgcagcacccggaggagttctccaaggtcgcggccgtgcaaaagaaggttgacgaggcgaaggcggtcatggttgacaacatcgacgcggttttgaagcgcggcgagaagctggagcagatacaggagaagaccgaggacctcatggcggaggccgaccgcttccgcgacggcgcggtgcgcgtgaagcggaagctgtggtggcagaactgcaagatgaagatcgtggtggcccttgcggtcatcctgctggcggtggtcatcttcctgctggtctgcttctcgggcggcaactgcctcaagtga

SEQ ID NO: 130 - DNA, 900 bp, Chlamydomonas reinhardtii
atgataagatttgttcactgggttcgcaccaacggcggctggcgcttcttcgtgcgcctcttgttccagggctaccagggcggggccgctggcgtgggcccgttcaggtggcagtggggcccagcagcgggacagcaggcgggtcagcagggtgctgggcgacccggcgccagtcgccgccgcgtgacactggaggaggttgcagacgcgctagctaagctgcccacggaggcatacatgacgccgcagcagatggcggcactgtccgtgcacgagcttaaggcgctgctgcacggccgcggcctggagccggtcaagtgcctggagaagggcgagctggtgcggcagctgctggagcacggcggcagcagcgccgactcgtgcagcatatgctgcgaggagtatgcccagcaggcgtcaggagccgctgctgagacggcgcagatgccagcggcaggaggagcggccgcagcaggagcaggcgcaggagcagtagaggcggcggcggagctggggcatggaggcgccggatcaactgagtgggtgacggacgtggcggagcggaatgaggctggggccgaggaccatagagcgtccgtggctagcgcggcaggggcagaggctgggcccgcgtcccactgcggcgcgggcggtggtggcgccagcgctggcgagcacgccgtcccagccaatagcggctgccgagccactgggggcatcgcatctgatgctgcagcggaggcggaggacgacgcgcctgttgtgctgcgcgtgctgcggtgtgggcaccgtttccacgtggagtgcgtggacaagtggttcctcagtgccactgactacacgagggaaccggcatgcccgctgtgcaatgcaccgctcatccttcctctccggcaatag

SEQ ID NO: 131 - DNA, 963 bp, Chlamydomonas reinhardtii
atggcgcgattgcaagcaagctttgaagccggagcgagccgcagcggcgcgctggctagcacttcccagcgacttgttcgcagtcctgtactcacagcagaagcaccagcaggagcgcgcttggcactcagggcgcttgcctgcggcccgagcacccacatctgcccgcggctgctggcagcccacagcgctgcggcctgcggcgcctgctccccaacccgcagctgcacacacgccgcggcagagccgctaggccagacccgcaccagcggcctcaggtgtgctgtagtagctagcgcgcagcggcgaggcggcggcggcggccggggcagcaagtgggacagtgatgaggagctggaggaggacctgggcggcctgcgcttctccaagcgcagcggcatgtggcggctgcagtacaacaagtacggggcagaggtccgcgaggacgaggcgtggaagctggcgctgccgctgctgggcggcctggtgctggccaccacactcataggcccgctcatcatcggcgtggccttcacggcggtggctgtgggcgcggcgctgtccgcgggcgcgctgttcacctcgctgttcctgcccttcttcctgctcatcggctttggcgcgctgttctggggcggcgtcaccttctccgccttcgccacgctgggcgccgcgctcatcatcaagccgctcatgtcgctgatggtggccggtgcgggtctgggcatgggtgccctggctgtgggcgccttcctcaagcccgcgtccagccgggccaaagcgagctatgaggagaaggctgcggcggccaagtccggggccaagcagcagggcgatgtgatcgaggtggagccggaggtggaccccgaggtggacaggcagctgcgcgagtttgacgagctgctgatggatcgggagcagcagcgccgcaagaccgaccgcttccggcagggcggccgctga

SEQ ID NO: 132 - DNA, 5856 bp, Chlamydomonas reinhardtii
atgccccagctgacacgcgcacggcctgctgctcacgtaggcaatacgaacgacggttcgcaacaggcagccggggcggctggcgcagccgcggccggtgccccagaccccaacgaccccgacgcagcggcggcacagctgggcccctccgcgtctcgcgcgggatctcaggcggggtcacagggcggggcgccgggggccggcacggagggcggtgccggcgcagcccccggcgcgggcggtcagcctcagggtccgggcatcatgcagaaggaggagcgggacgcactgcaggtggccatggtgtcctacgacaacagctacaagctacaagaggaggcgccggccgtcaccgccgccatcatcctgcacttcgacaccggccgcatcacgggcgcgccggcgccgctgccgtctcgcctgacggcgcagcacgagggccgcttcgctcgtgaggagctgggtctgtaccgggagaaccaggccttgctggcggagatggctggcggcaacgcggctgcgggcgggcagcaggtggccatcatggctcagcggcaggcggtgcgggcgcaggaggtgcagacgcagcagctgcaggtgggcgcactccccacactcacggaggagccggaggggcaggaggggcagctggcgcagccgccactgggggagcagccgcagcagtctccgctgccaccgggcgctggctcacctccgcacgggcagcagctgcagccggggcaacagccgcccatgacgccaggaggacccacgctcccgatgccgcctgggcccggtggctcgcctcccatcatggcggcggcgcagctgccgttgtcgcccggggccgaggcggcggccattgccgcagccggcggcgccctcacgcccgagcagcaggcggcgatgcagctgcaccaccagcagcaacagcagttggcggcgcagggcattctgccgcctggcgcgcagggcgacccggctgcaatggcggcgatgatggcggcaggaggtggcggcggcggcgttgatcccatggcgatggccgtggcggctgctgctgcgggcgctccggccaccaccgccattcaggacccgctgtttgcataccagtggctggatgagaacggcctgatggtgtaccgcgacaaggagcgacccgcccggcgctatgaccaggacaaggagatgacgcggacgtatgtgcggcggccggtggtggacgcggtggctggcgcgggcggtcgtggcggtcgcggcgagtcgcggctgtaccggctggacatcgagctggggcggctggagttcggggtgcaccccgccatgagccaggaggacctgctggctgcccggctgatggccctgttccgcgagtacaagaagcgcgaggcggtggggctggtgctgttctacgccggccgcctggccgcgctggaggacagcctgctgggcgcgcgcgagaagctgtttgcgctgcaggccacggaggcggccgctgacgatgtgctggacgcatacgcactgctgggcaagattgagcgggaggttgcggagctgcgtcagctcaaggaggaggaggaggcgctgctgactcgcaccgtgcgagccatggagcgccagttcgaggccctgcgcggcattcggcagcagcagggctacgcgctaacaaacctggagctcacggtgctcacacgcccgccgctggagatgagctggaagcagggcgtgctgacccgtgagcggctggacgtgctgctggtgacggcggagctggaggacattgcgggcctgcctcgcttcccggaccccctgcccgtgcccgacctggcagacttgcccctgccccgagtcaacgccgccgggctccccgccgccgccgggggcggctttcccggcgccttttcgggcgccccgggccccttcggggcgcccctggcgggctatggggcgctgatgtcgggtgggcagtcggctgcggctgcggccatggcggcgggggagggctacacgttccggctccggcgagtggagtccatgtgcgccgcgcacagcgcgctgctggcggaggcggtggcgcggctggatgcactcaagaaccgcccctccgccgaccccgaggacccggtgctcaaggcgctggaggaccaggtggcgctgctggggcgggcgccgcggcgtgtggccatgatggcagaggacagcctggagctgcagcgccgagccaccgagatggtcaaggcggggcaggtgcacgtgagccgtctgccgcacctggtgccggtgctcaccatcaaccccaccggcgctgcaggggggcacctgccgcccgcagcccagcagcagctggcgtacatgcagctgcagcagcaggggcagcagcaggggcagcagatggtcatgacgccgcaggggctgatgccggcgccggggcagcagcagcagcagctgggcccggggcagcagctgccgggagccgggccgcaggggcagcacatgggcgggccgatgggcaatcagcccaagacggtggggaaacagggcagcaagggcaggtactacgtgaagctgttcgtgaaccacaagttcgtggaccagtcggatgtggccacactggccgagaacttctcgggcgacttcaaggacctgttcagcgtgcaagtgagccacttccccgagtccatcctggtgcagctgtatgagcgacacgcgctgagggactacttcgtggctcaggtatacgtggcggtgccgggcgtgtccggcacgccacacgtggacgccacgccgcgcccctaccagttcacctcgctcaccgctttccgcacccgcggccccaacaccagcaaccccaacggcggcggcctgtccggcgccatgccgctcatgccctccgacaccggccggcccgacggcgcgcccggcgccttcgccaccgtgttccccgccggcacgctgtacgtgcggtgcggctgggtgtcgcagcgggtggcggcgggcgcgagcctggaggagagggtggtgcccaaggccatgaccacgtacgacaacccgctggcggaccgggggcgggaggaggggccgctgggcacgtgggcggggcagccgggcagcggcgtggtgggcgcgccggacattgagagcgggcgcagcctcatgccgccgctgccgtccgtgcccgtggaccgcatgctgcgccgcgccgcggagcgcatcggcggcaaggccaaccgcgcccagatcatgcggtggctggcggacaacgtgatcgaccccaacgacccgcgcaacgccccgctgctggagctgctaaagacgcacgaggccgccagcggggcgctgggcgacctgttcaggctggacatattcccagacgtggccatgaaggacgaccgtgtggcggacaaacgcatgagtgtgctggcgcggcgctggcaggccggcatctaccgcgcccccgacaagaacctgctcaagggcgtgcgctccgtgcccctgcgcgcccccctgacctccgaggagacgtcgcagctggacagccagtacctggaccagctggcgctgctggaggaggcggcggacggcacgcagctggggctggcgcgggtcatgatggcgcggcacgagaaggccatgcaggtgcagatcggcgctcggctgaccaacgcaatcaaggagcgcgaggagcgcatccgcgccttcgccatccgagtgcgcgccgccgcggcccggctggcgggcggccgaaccatggcccgccgcttccggaccgaggacgtggtgaacgacgcgccgctgccgcagttcaagctggagctgggggccattgcgcagctgctggcgccgcggcggccgctcaagaggtccaagaagctggtcaagtcgctgatgacgtcggtgccgcgcgagacgcagctcatggtcaccatacagcgcgcagccagcctgcccgcgcgcatggccagatcggccgtgggcggcacagacgacaagcggctgcgacgcggcgcgggcgtggaccggcggagaggcgggcgggcgggcggcgacggcggcgacgagggcggaggcggtggcggcggcctgccgtcgggggcgccggaccggctgtcacagcagcgcaactgctttgtggaggtgcgcttccgcagcctgtcgcagcgcaccatcgccgtgccgggcgagttccccatcttcaacgaggagatcgacctggacgtgttccgggacgacggccgcgacacgcagcaggccggccccgaggacggctcggcgctggagccgtcccccagcgcgctgcaggagaactccgacctcatcaccttcaacgtgttcgatgagatcatcgtggagccctcagagccaattacgctgcgcaggagggacgcggagatcagcgacccggtgcgtctgccggagcgcgagcggcgcttcctgggctgcgtgcgggtgccgctgagcgccgtgtaccagatgcaggtgctggagggcaccttcaagctggaggcgccgccagtggtgctgggatacgtgcagaccagccagcggcccagcaccgtcagcatctacatgacgctgcggccgcggctggccgcccccgccggtgagatggacgagcgcatcacctcgggcgagcaagagcaggtcaaccggcacgcacaacggtggcgggcggcgctgctggggcgggccgagtgccgctcgcgagtcatcaaggtgatggctgtagacgcagacggcgcggcggtgctggtgtgccgctacgtggcgcccacactgctgccgccctcgctggccgtgaacgtggcggcgggcggcgcggcggtggcggcgggcggggtggagatgctcatgctcaagctggccagattcgtggcgcacgtgccgtacatggaggacagcggcctgcacaagcggcgcaacgacatctggaccagcagcagcgagctgctgcacctggcgggcggcgacttcgaggagcacgcccacctgctggcgggctacttcctgcagctggggctgcaggcgttcgtggtggccggcacgtcgctgtgcggcgctcgcagcatgttcgtgctcaccaccggccaggccgccgcaccgccggggcagccgcaggcgccgccgccgcccctgcatctgaacgcggagctgctgcggctgtggaaccccatcaccggcagcgtggtgtcggtgaaggaccccaccggggaaatgcgcgaggtgggccagctgtacgacggctccaacatctgggccaacacgcagcccacggggcggccgtgggagatgaactggaacctcaccagcggccgcgactggacaacgccgctgtacgaggagcttgagaagcagttctatgaggagctggaggggcgcgtggagaaaaaggtggaggaggccctcagccaggctcgtgccgcgggcgccttcgtgaccaagcccgacaacagggtgtcccgactgctgaagaacctgctgagggagatgcccaagaccagcgaggccatcgcggccgcctctctggccgccagcgcggcgctggcggaggcggcgggcaaggggccgctggaggcgccgcagcacttgggcgagcgacacaacctcatcaccggcctgcaggccagccacaacgagcgcatccggcgcgagtccaaggccgaggcggtacacggccacgtgcttgcgctgcccttcagcgactcctacctggaggcggtggcggacgcagtactcaacacgggcatccaccggattgcggacgagcgggtgaagttcagcaccgccgtgttcgtggagccgctgggcgcgtccttcgtgtgctgcgtctggatctatgtggcggcgattcgctcgtga

SEQ ID NO: 133 - DNA, 2349 bp, Chlamydomonas reinhardtii
atgagctacgggggcacggaggaggatgacctttatggaggatatgatgagcaatcgaacccgcttgcgggctcgggtggtgccgcatttaaggcacttggggccgatggagctcctccaggcaccgccatgatggggccgcctggcacggccatgaagagcttcgtgccaggcacggctatgcggggcggcacggcgatgcagcaggaccccagcctggcgcggcctatgacctcgaaccggggtgctggcttcacgtcggcgcctaacaagaagtttgaccccctcaatcgctcaatggggtcgacactgggctcgtcggggggtggcgcaatgctggtggctcgcaagggtgacaccagcccggaggagcaggcgcgcgggatggagaagacggtgcatgagctgcttgagaagagcgcggcggacgcggctaagaatgacatcaactcggccctggagaacgccatggaggcgaagaagaatgagcgaaagctgtgccgcttccgggaacagaacaacatggcggaccagatcaacctggagctgatgtacgccgtggacttcaacctggcacacatgtaccacatgaacaagaactacagcgaggcgctgaacctgtacacagccatcgtgcgcaacaagaacttcccgcagtcgggttggctgcgcgtcaacatgggcaacatccacttcgagcagaagaagtacccctccgccatcaagatgtaccgcatggcgttggaccagatcagcgccaccgccaaggaggtccgcttcaagatcatgcgcaacatcgggctgtcgttcgtgcgcatgggccagtaccccgacgcgctgcagtccttcgccacggtcatggacaacgtgcccgaccaccagaccggctacaacctggtcatgtgcaactacgcgctgagcgaccgcgagggcatgaagaacgccttcatcaagctgctcaaggtgagcccacccagcgagatggatgacgatgacgacgacgaccccatgggcgatgacgacatgcaagtgatgaccatggatgacgggctgaaggacgagatgcgcaagcgcaacaccatcatcacgcgcctcattgtcaaggccgcgcagctcatctccgagaaggtggatcgcgccaacggctttgagggcggcttcatgtggtgctgcgagcagctgcgcgacgcgggctacaccaagctggccaacgaggtggagctggccaaggcgacccggttcatggggcaaaagcagtttgacaaagccgtgggcgtgttcaaggactttgagaagaaggagccgcgcgtcaaggcgcgcgccgccaccaacctggcgttcctgtacttcctggagggcgagaccgaccaggccgacaagtacagcgagatggcgctcaagagcgaccgctacaacgcacgagcctacgtcaacaagggatgcgtgctggtggagcgcggcgatctggagggagcgcgaagcctgttcaacgaggctgccggcatcgacccctactgcgtggaggccatctacaacctgggcctggtgagccagcgcctgaacgagctgccgtacgcgctggcggcgttcaagaagctgcacaacatggtgcccgacaacgtggaggtcatccaccagatcgccaccacgtacgacatgatgggcgacttcaagaacgcggtcaagtggtttgagctgctcacctcgctggtcagcaacgaccccggcgtgctggcgcgactgggagccatccacgccaggttcgacgacgaggccaaggcgctgcactactaccaggagtcgcaccgcgtgtacccggtgaacatggacgtcatctcctggctgggcgcctaccatgtcaaatcggaggtgtacgagaaggccatgcccttctttgacctggcctccaagatccagccgcaggaggtcaagtgggcgctcatggtggcgtcctgctaccgccgcaccaacaacctgcccgccgcgctgggcaagtacaagcaaatccacacgcagcaccccgacaacgttgagtgcctgcgctacctggtgcacctgtgctccgagctgggccgccgcgccgaggccgccgagtacatgaccaagctcaaaaaggcggagaaggcggcggtgcccgaggcaacgacagcggcggcgcccgccgcggccgcagctggcagtggcatgggtggcatgggcggcctggacgacgacattggcagcagcgcggtgtcggcgcagaaccgcggcaagaagatgctggtcaaagagcacatgggtggcggcggtggcaaggacaacgacgactggggaaacgagcagcttggggacgacctgctgcccatgtaa

SEQ ID NO: 134 - DNA, 11601 bp, Chlamydomonas reinhardtii
atgagggtgaatgccggcgacggcagagctgccgccccgatcccggagaaaacggtgctcttgaagggcccactccaggaccgggtgatagcatggtcgctcgacgccatcgaaaacggcgaggcatggcaaaaacagctccagccgctccccgacacctttgagacggcggaggagtgggccggcctgctgcagccctttttgctgctggagatgcaggcggggctgcggcaggcgctggagcagctgggctccgccaagtggctgccgctggacggcgtgccggagctgcgacgagataacgaccaacgcggcggcggcggcggtttgattggcggcgaggaagatggcttgggcggcttcgcgccgccgactttatgcaaggccactgtcaacttcaccgtgcgcgggcaggaccgaagcggcgccggagcaggcgactggcgcgccgcgcgtgccgccaccgcggcggcggcggcttcacaagcgggaggtggcggctgggtgcacaagaagccgccgccactcaagcccactgacatcgtattgctggtcaacgcccgggtaccggacctggcttcgctccggcgcagcgacgtgctgtgggtgctgggcgtggtgcagcggtcgcaacgcggcatcgtgggggacgccgaggacgaggaggacggaggcggcggtttcttccgcgcggcggtgcatgtggccgcgggcagcagactggaggcggcactggccggcggaggcgccgccgcgtctggcggcggcttggcggctgcggcgcgggagtggtacgcggtgccggtgggcagcatcgccacagacgagcgcgtgtggaatgcgcttctcttcctgggcccgctcccggtggcaggcagcggcactgccctgtcgcgtctgttgccgccaccgccgcagccatgcatgctgcagctactgctcggcgacggcaggagcagcagtagcagcagcgccggcgctggcttcggtggaggcagtagcactgtctacgtggaatccatccgtgccgctgctcggcactacgcgagcaccgtgcggcggctcaatccctcgcagcaggacgcggtcgtgcgtgcggctgtggccttggcggcccgttccccagccaatgccattgccaatgttgaagacgcaggcagcggcagtggcagtagcagctgcggcagtagcggcggcggcggcggccgcgcggagctgcagctggtgcagggtccgccgggcacgggcaagacctccaccacggccgcgcagctgtcggttctggcggcagtggggaggccgggcactgcgctgctggcaactgcgcccaccaacgccgccgtgggcgagacagcctccaggtttgtgaagctggtggcggcgggcggtcagcagtttgcggacagcgaggctgcggcggagctgcgccgccacggtctgcgcgtggagccgccgctcctacccggcgacatcgtgctactgggctcgggcgaccgactggacctgaccggcagccccgagctgctggccgtgttcctgcaggccagggccaagcggctgtctgcggcgctggccacctggtccctgacggtactcgacatgcggcggctgctcgcctacccctgccaggtgcatgtggacacattgcgcgcggcggaggcagccaccgccgccgccgccgcaccgggtgcattccgacagccgccgccgccaccgcagccgccgccgccccgaagcgtgggagggtttctcaagcagcggctgccgccgctgctgcgcgagctggcggccgcggccagatgcctactcgcagacctgccgtctgcggcctgggtggcgggcagcagcagcaacaacaacaacaatagcaggggcaacagcactgggatcgccgctgtcggtgggcgtggcgccgccaatggtagcttggcgccggcggccgcatatgccgcgcgagccgacaccatcgtggcgaatcgcgacgcggtgcagggcctggtagacgcgtgcgcccatctggcagcggggctggcggcggcgagcgctgcggaggcgtcacgtgcggctgaggaggtggagcggcgtggcggcgccgctagcggcgccgacacagatgccggcgggcccctcctatcgggctccgccgccctggcgtcctccatgctcgacctgacagccgccatggaacgtgcacgccgcgcactcgcgtcgaatgtgcccatgcccaacgcggcgcgctcgggcggcgggaacatcttcgggtactgcctctcaaaggcacgcgccatcttcgccacggtggcggcggtggggtcggcgcgcatggccgccgccccgcccgtggaggcggcggtggtggatgaggccgcccagctgccggaggcgcacctggctgtgccgctggcgctgtgtggcggcgggtcgctggcgctgctggtgctggtgggcgacccccagcagctgcccgccacagtgctgtcgcaggtggctcaggccaggttgtacggccgcagcgcctttgagcgcctgcagcggtgccaaggctggcccgcgctgctgctggacacgcagtaccgcatgcacccggccatcagcacctggccgcgggaccgcttctacggcggcagggtggtggacgggcccaacgtgaccgcccccgcgtacgccggcgtggcgcagctgctggggctggcctgggggcccctggtggtgctggacgtgagcagtggggcggaggagcgggaggcctacaatgacggcactggcgaggaggacgccggcggcggtggtggcggcggcggcggcggcggcaaaggcaccagctggcgcaacccgcacgaggccgcggtggcggcggcggtggtgcggcaggtggcggcagcgtggcgagcgctgcgcagcaacagcaataccgtgagtatgaccggtgctggcgccgcgaccaatggtgctggtggtgtcgcggccgctgcgacggcggaggccctggcgggcctgacggcggcgcgccggtcgctctccatcggcgtcatttcgccgtacagggcccaggtggacctcatcacctccaagctggagcgactggacatcgaccttgcgttgcaggcggatgcggaggcagaggcacaggcggcggcagaggcgggaggggcggaggcgggcacaggcgggccgccagccgcgccatcaggtggtggcggcgtgtcggtcgcggtgcgctccgtggacgggttccagggccaggagaaggacgtgatcgtgctgagcctggtgcgcgccaacaccgccggctatgtgggcttcacggacgacgcacgccgcctcaacgtggccgccacacgcgcccgccacggcctggtggtgctggtgcacgccgccacactgcgccaccgcagcgagctgctgcgtgcgttcctggaagatgcaaggcagcgcggcgtgctgctgtctgccagcgaccagccgcagatggcgcccgcgttccgggctgtgcaggcggagcagcggcggtgcgccgctatcgtgcgcggcagggcgccgtgggacgaagcgccatggaaggtgatctacacggaccgctactgcagctcctgcatgcagctgcagcccaaggcgtggcgcgtgcgcatgatcgatgcggtgctggagctggcgcacgggcgcttcccgcggcggcaggtgccgctggcggcggtgcggcccgagttggccgccctgctgcgcggccaacggctgcagggcgggcggctggtgctgctgtggtcggtgcggctggagaggcatcagcagcagcccgtgcgccagggcggcagatgggtgcaagcgctgcagctgtgggacgtgctacggctgctgcccgggcaggatgcggagctgggtgcggcggtacgacgggtggaggccgagatggccacctacacagacgaacacctggctgcgttgcggctgggcgagccggggcccgacggcctcatccggccgcgcctgatctgcaccgggcccgacctgccctttgcccgcttcgttggggccgcagcagccgcccctggcggggccgccacctctgggacagcagcagcggggcgccacgccggcgtggggccccggggtgcagcagccgcgggcgctggcgacgatgctgacagtgccggtgtggacgcgcagcaggagcagcaagggccggacacgcacagccggctgtacgtgatggatgcgctgcacgcgcggcagctcgccaccagcgaccaggcgggcgcgctggcggcgatgttcaagaccagtgtcatcctgtcgcgggtgctgctttacgaggaggccttcgcgcggctgcacggcggcggtggacgtgatgaggcggagggtgggcagcagcagggcagcagtggcagcagcggcagcagcgcggccgcggccgccggcagcaaggtgcggcagttgatcgtgacgctgagcccccgcctcgcgagctccactgccacctacctgcgcaagtgcacggcccagttccagggcctgcagctggccgcgacagcagccgaagcgctcgatgattcggcagacgctggaggcggcggagcagatgccggcggcgggggcgaggctggcggcgggggcgaggctggcggcgggggcctgctgcagcttagtgacgacacggacgcggcacgcatgtacggcgacatgcccggcagcctggcggaggtgtcggacgccgcctgcccgctggtgctggacctgcgccgcttcctcctcatgctggacgccgggctgcctgacccattcgcggcggcacagcggcgtcgggcggcggcggcggcggcccggcgtcgggcggcaacggcaggtgctggcggtggcagcagggccgcgccggcgccggctcagcaggcgaaggcgccggcggcgcggggtagcgggcagcggtcgcacgaggatgatgatgacgaggacgttcctgacacctgggacgttgacagcgaggacggcgctgttgggctcggtgccgcgggcggcggtctgggtgcggccgtaggtcagcagcagtgcgaggcggcggcggaggcggtggaggtggactatgagcgctttgcggcggcgtactggccgcgattcagtgccgagctgcgcaagggcttcaaagagccggctctggtgtggcgcgaggtgcagacgcacatcaagggcagcctggctgcggtgctgccggaggcctggggcggcggcggcggccggctgtcgcaggaggcgtatgtgggcatggcggattcacgcgccggcgcgaacctaagcgccgagcagcgcgagtgcatctacaaactgttcaagcagtatgagcggcagaaggaggcgcagggcgagtttgacctgggcgacctcaccgcacacctgcacacggcgcttggcggcggcggcagcaggcgtgcccaggcggcggcggcgctggcggcggcccggcaattccgatttgtgtacgtggacgaggttcaggacctcacgccggcccaggtggcactgttcaagtacgtgtgcgcccgccccgccgacgggctgctgctggcaggcgacacggcgcagaccatcgccaagggcgtggcgttcaggttcgaggcgctgaaggacctattctacctgtggatgctgaggggcggccctggcgggcaggggccgcccgcgccgctgttcgggccgggacggccggtggccccgctgccgctgggcgtcaaggtgcccgaggtgacgccgctgctggagaacttccgcacgcacgccgccatctcgcgactggcgcacttcggcgtgctggagccgctgctggccttgttccccgaggcgctggaccgactgccgccagagacctccaagctccggggcccgaagcctctgttcctgctgccctcctgcggccggctggaggacctgctcctgccagacactgctgctgggggcagtggcccggccgccgccgccgctgcccgttcgggcgggggcgccaatggtgggggtggcggagaccgcggctcgaccgcagccgcagcggcggcggcggctcacgaggtggtggtgctggtgccgaccgaggcggccaagcaggcggtgcgccggcagctggggtgcggcgacggcggtgcagggcagcaggtgctggtgctaacggcactggagagcaagggcctcgagttcaaggttgtgctgctgtacaacttcttcagctgctcggctctgcagcccgcctcacgatggcggctgctctaccgcctgctggtgcagcccgagttcggcggccggctgcgacccgagcaagtggagccgggaggggagttcgcggcgcccagcttcgacctgcgggttcacagcgtgttggcctcggtgctcaaggaggcgtacgtggctgtgacgcgcgcgcggctggatgtggcgattctggaggaggaccccgcagcggcggagcccgtgcgcgcgctgtggggaaagcaggggatggatctggtggacgagcgagcgcaggcggacgacgcggtactggtccggctgcggcggcagatggagccggaggagttgcggcagcgcgcggcggacctgttcggggtgggcaactaccgcgacgcatcggcgctgtttggtcgcctgggcgacacggcaaacaagctgttctgtgatgcccagctggtcaaacaagacgccgtgcgcgctcacaacgaaggcagagccaaggctgcagagcggctgcacgcgaccgcggcgcagctcttcatgcagtgcgggaggtacgcccaggcggcggagcagttcggggcggcgggactgtggggcgaggcgggagacgtgtaccacacccacctgcgggacagcctccaggccgccacctgctacgagcgcgcgggtcgctgggcggacgcggctcgccggcttgtggaggtggcgcccacgggcccggcaggaggaggagatggtggcggcgggccggcgcacctggaccgcaccctggccgcctgcgtcgcagccaaggagttcatgctgggggtggaagccttgcagcgctggagccagcaacccaacctcctgctgccgccgcagcagccgcagcagcaaccgcggccggcagcggcaggggccgccgccgcggctgtggcgcggcgcgcacagctgctgctgccacggctggtgtcgcggggcgcgctgcactggagggacgtggcgggcgggcgcgatgagatgcttcgcttcgtgcagctgctgccgggtggcgagacggcgcagcgccgctggctggaaaggtatcggctgtttgacgagatcctgcggctggacgtcgccgccggccgcttcctgtctgccgctcgcatcatggaggcacaggcggcggcagtgccggcaaccggcggcggtggcgcggtggcggcggaggcgctggggcacgcggtggagctcttcgtcagggccggccgggcggaggaggcggtggcgctgctgctgcgccgcgcgcgcagcgctgtactgtggggcggcgagcggtcggactggccgccgcccaagcggcccggcggcggcggtggaggtggaggcgcagcagcacggcacctggagcaggcgctgcaggtgctgcagcaggacaacgcggggggcaagatggggccggtggccagacgggcctgccagctgcaggcggacgtgctgagcctgctggtcaagtcgggaggtggaggcggaggcagcagcagcggcgagagggcggcggcggtgcacaacaaagccgccgctgctggcgtgcccctgcaggcgacgacaacgctgttggagcagtgggaggactggcgaccgcgtatcggtgcgctcgaggcaagcgcaggcggcagcggctgtggcggcgcagcggcgctggcgcggctgtgcctgctgcggcgcctgtgttatgaagccgtggaacaggcggcggcggtaacggcgcagcagcagaagcagcagcaggcgcagaagcagcttccctccatcaacagtgctggcaggccagcggcggccgccgccgccgccgccgccgccgccgccgccgccgccgccgccgccgccgaggcgaccaccgcctccattgccgccgccgcggtgcagctgctccgcctgtggggcctgtaccgacgctctctgacagacgtgctgcgtgtgctggagcgggcgcagcagggagttgtcgcagcggccgtagcgcccggtggcggcggcggcgccgctgctgccaggtccgccgctgtcgggtccgcggcttcctcggctgcggctcaggaggcggagctgctggcggcgctgcgggcataccacctggtcgtgcccggaggcgcacacgccgccggtgccgaggcggcggtgtctgccggcggcggagcgggcggcagtggcgccggcgggagcggcgagctgcggctcgagtgctcgcacagcgcggcctgggtgcgcccgccggcggtgcgcgcggcgctgcgcaaggtcctgatctccaggtgcagcctcggcggcggcgtatccaatgctgccgacgccgcggcgccggctgctgctgctgccggcggcggcgacggagcggcaaccgtgacccagcttgtgctcacggaagtgtcgcctgacacgttctacgccggcgcctcgctctactggcgagcggagctggaggcgcggtcggcggcggcgctgagggcgctgctcggcatggcggaggccctgcggcccagctatgagacctacaaggccgtgggggacacggcgctgacaggcggccggcccaacgcgctccttcagagcaaggcttccgaccgcggcggcagcaacaaaggcgccgctagcggcagggtcgcggcagccaacgcggcagccaacgcagcagccggtcgcccacctgctggtctggcagtagcagcagcagtagcagctgctgccgacctggacgccctgctggagcagctgctggccgccaccgtcacggcgccgctgccggcactgctgcgcgctgccagcctgccggcggcgcggcgccacgcgctggaggagctggaggcgcactacctgccgcgcctgctggcggcggcggcggcacggcagccgcggctggtgctgccgctggtgcaccgggcgcaggacctgctgtgggagcggcccgcgcccagccgcctgacactggaagaggtggccagggtggtgctgttgcagccgctgctggcgccgggcttcctgctgcgtgcggcgtacgagggccaggtggactgggaggtggtgtgggcccaggatccacggcgctactccgcctggcagctgctgctggagagcagccgggtggccgaccacgtccgccccctggtggctgcgggcgccgaccccggggacgtcatgggcccagcctgggtggcccgctctggcatcagggcgctgctggacctgcaccgcggcgcctcgctcacgccgcagcagaaggagtggcggccctgggcggcggtgcggccgctgacgtggctggcgctgcttgagcggcactgcctgctggcgctggcggtgctcagcggcggcgccaacaacctggtggcccccagctccctcgtgttcgaccacctcacgcagcctggcgtggcggacctgctgaccctgagcctgcgccacacggcgcgtgaggccgcgccggagcggcgtcaggcgctgtatgccctgctgtgcgaggcgtgcgatgcgctggccagggtgctgaccgcgcccgaggccgtgcgcccggccggccgcgtgcatgacggcagcgcgcgtggcggagctggcggagcaggcggaggcggtggcgcaggtgggagtgccgcagcagggcagcagcagtggccgtcgctgcagcaacagaaggtgcagccgcagaaggcgcgggtcggcggcgggtcggcggcggctggcagcggcgccggcggcgccggtggcggaggcagggacgaggacggcgaggagttgggcatgttcctgcgccgagcggtcgcactgctgttcaccattgccatcaacgtgcgctcgccgccgctgcagcagcagcagcaggcgccacagcatccgtaccagcagcaccagatgcagcagcagcggctgcagcgtgggttcctactgccgcaggagcagcgcctgcagtcataccagcatatgatgcagccaccgccgccgccgcaagcgccggcaccgcagccgccagcgtctcctgcggcctcctgctggcgcgtggcgcgcgcggcggtaggcagtttagggccgccaaacgcaggcggtgccagggcgcccagcggcgctgctgccagcagcggcagcgctcgcggtggcctggcggcttacctgccgctgcttccctacaccctgcgcttcatgctgtcgagcctgaacgccctccacagtcgcagccctgcgctcttctctgagccgtcgctgctggggcccgagttctgcaaggcgctgcagcgaggcggtgacaagccgctgcggctgttccggcgcgccgtggcgccgccgccgggaatggcgtgggcgcgggaccggaacaagggcgtcaacgtcgaggaggtgcgggagctgccgccgctgcgagggcccggcgcggctgctgctgactatgcggcggcgcggggacagctgcgcaaggtgcttttctttgccattcccgagaacctgctcagctccgccgcagacgacctggcggccggcgacgacgacgatggcactgccgcagcagcagccggcggcgccggccagcagcagcctatgagctccctcggcgaggaccacgcagcggcggctcgcacggacgccggcgccggcactgtcactggcaccgctgcggcggcagcagcagcagcaggcggcgaggtaggctcggcggaggacgctgcggcggcagcgcggcagcaggtggtggccacggcggcggcgctgggccggcggggcttcgtgatgacgtgggtgtggctggctcgtgcgcggcagcaggcgctgctgccgcgcctcagtccgctgcagcgcgcgaggcggcaggcggtggctgcctttcatgcgctactgccctcggtggcgggtgctgccagggatggaggcggtgcgggtggtggcggcagcgctcagcggggcggggccgccaaaagccgcggcagcggcggtgagggtgctgacagaggcgcgaagctgccgggtcgcttcacggcgtacgtgtcgctgttcctggagcaggcgtgcccgctgcaggtggagctgcagcagctgcagggggccctgcaggaggcactgcggcggctggagcagcagcagcagcagcagacgctgggtggcagtagcactggcgccgcagcgggtggcggcagtggtgctggcggggaacagcagcgcgacgtggtgcagctgcttgacctggcgtacgagtacacggagcggctggcggcggaggcggcggtgctggacgtggccagccacgcgggccgccacgccgcctgcgacgcggcctggctggctgctggggcgctggagccgctgcggctgctggcggcggaggtgcgccgggagctgggccagcagctgccggggcaggcgccggggcaggagctggagccctag

SEQ ID NO: 135 - DNA, 942 bp, Chlamydomonas reinhardtii
atggtgcaggtctacactgagccgttgtgcaggcggtactatggtagtgtcattggagaggcagcactgttccgcttttttgcgtacctctccgccatcgtgctggctctggtcgttgccttcgccaccgggggcttctgggtgaagctcacgccagataatgtgcaggcgacagtatcatacacacaggatgccatcctcatatttgagggtgcggagactgggcaagttgcgttctggagcacatcacctgtgctgaacgcggagttctccaacctgtatactgcggccagcgttcaggtgtcgtctatggatgtgaacgatgatgggaaggcggacctgatcactttccaggccagcgtggccaatgacttcccagttcacagcgtcaaggcgctgttgcagcttcactactctctgacaggccacctgcagctggacatgtacagcttcgcgtacctggcgcagagctctccggctccaggggccgcactctacacggatggagagctcttgctgtcatccacgaaccagcttcaggaccggaactacaactccagatacaacacgccaatgctgaactccagcacgccatcctactccacagccgtgcagccgtcagtagcgctggagatgcaaagcatcctgagcagctacctgagccgcaacttcaccaccacctacagcaacaactttcccgtctgggtgggcggcacagggacctcgtttaatttgcaaatgcgaatacggattccgcccaaccaggtcatcttctacaggcctcaagccattgagatgctcaagttcggttggatccagtggcttgccacgttcattgtgctgtggtacctgctgcaatgggcagagtggtttgtgttctactaccgtttggtcgagacgcgggttgtttcagacctacaaccaaggcaacagcgtttttaa

SEQ ID NO: 136 - DNA, 1401 bp, Chlamydomonas reinhardtii
atgggcagcggggagaagggtgtgatgctctgtgagcgaccaaagccctccgcggtcgactcgtcgcctgggctgaagccgtttctcccatcgtcggtgccctctaatattgagccgctggggctggtaccaacccaaaaggtgttccctcccagcctggcgcccaagcaggttagcgccaccagcaagcatgtgaagtacgtgcggaacctggagcaggagaaccgtgaggcggcgctgcgggaagaggagcggcggatggctgaggcggccaaggcggagagcgtgacttcgttcaacgcgcaactgcgagccgcaatcctgaccggagaagatgtcagcttctggcggccagctaaaggcgcggaggcggtccggcagtccctagcggagtccgtcgcacggaccgccgccctgggcagcggcagcccgcaatcaacagccgccgcagcggctgcagcggaggcggcgcgcaagcgtctggagctcacggcgaatgttagcgggttcgtggaggaggtggttggcgaagccaaccagaagctgacggcaacgagcaaggtcgccatggcctcgttcgtagatgaccttttctcagaagccgcgggcgcactagcactaggcggcgaggacgaggaggctgcagggcgggcagacggcacagcggaggccagcaccagtgccgccgccgccgcaggcggtgccaagcccggggcggccaaggccgcggccgcgggcgggcgcaaggtgcgggtggcgtcggctgcgggcaagccggcgtgggctctgagctcggagcaggtggagaagctggaggaagctgaggaggaggagctgctaaaattcgcggatgacctggactttgacaacttcatgtcctctctcgacgaccccgagctgcaggagagcgtgcaggcgctgcgtggcgcggacggcaagggaccagcgccgggcgaggagaaggcctggcgccagaacctggtcaaggccatgaaccatgtggccatgcggcaggtggcggcgcggcgggcggcggcggcggcggcgggcggcgccgacagggatgacgcgtgcagcattgcgggcatgtcggagggcggggctagcatggtgtcacgcgccacggctgcgagccggatgaagtcagaggcggcggcggcgaaacgggcggcgctggcggagggtggcgagggcggcggcaattgggagtcgtcgacgcgcgcgggcgaggacgtggcgcggatggagcggtcaaaggcggcggcggcggaggcggcggacttcctgcgggaaaatcccgagctgcgggcggtgcactcaccggcgagtgtgcgcgcgatgatcaccaagactgaggcggcgggcgcgtccgggggcagcccgcttgcgaaggcatcgtga

SEQ ID NO: 137 - DNA, 1298 bp, Chlamydomonas reinhardtii
catcgcgcatcggcccggccgcggcgccagcaaggagccttcacgcagccaacgtaccagtcgctcatgttcgcgctatgggcgaagcagccacgcagccacgcgccccagctggtgcacttctgcgacaggccgctcccccagctctgggcccctgatccccgtgccacgttgctgcgcttaggagcgccgcgactgctcttcgggcaggcgcagcatctcgtgacggacctggtgatctacgagtcgcagcaacagctgccgcagccagggtttcagcgtaacccgcctgcgctgctggtggatgtgcgacgcagcctcaaggagcggatgcagcggcccccagaggacgcaaaggcctgctcgaacggcacattcattgcgttctttgtgacagctggtcacaaaaccgccgccaagcagctggctggtggtggcttggcgcgtgcgctcttctactcggacgagtggcgctgtgtgaacctggagccggagctgctggactggtatgcggacttcttcgacttctgcgggctcccccagtaccccacacgcgactcgctgtttctgcctgacgtgtgcgcccagcttgtcacgctgccgcagccggggccagccccgccagtgcacgtgctcatgccgcgtggctcgcagacgccccggagcgccatcctacccggcgactacttctggctgcaggaccacacctttgtggcctgcgcggcccagacaagcagcattcgctgcacccgcagcggctgcggggcggagtgccagcacgtcaagcaggtggaggaggtcttcgggaagcagctgccgccggcagccctcggctcccgccacaagccgccaaatgaggagcccgggcctgcaagtgaacaggctggcgtgatagcggtagcagcggcaacagcggcagccgaaccgccggcggaggtggcatcgccgccgccgccgtccgtgcggtaccccttcccatgtggcgccggcacagctgatgccatggccgctggggagctgtccccgcgcaagctgatatgcgacgggacggccgtcacctaccagatcgtccactattgcggcgtggcgctcaccaccctggcgccgccgccgggcaccctgcttccagtggccgcctttgtagcgcgcctgagctgcctgtcggagaagtgcaagggctttggcggcgggccgcagcttgcttcgtgcggagcagcatccgccgacacggacgagtgcctgcgcctggtggcctatcctgcgtccaccagctgtacgccacgggcttgtgggggtaa

SEQ ID NO: 138 - DNA, 2217 bp, Chlamydomonas reinhardtii
atggctccgacccaagcgggccacgacacagcctacctcaaagagaccgtaggcgaggccctcgctcggggatgcgcagccgctattagcgcacagccaaacgaccccgtggagtatctgggcctatggctgctcaaatacgtgaaaaatgctgaagtagaagggaacttttatcgcgagcggcaacaggatttgcaaaagaagaaggaccgactggtcaaggaggcgcagtcggagcaggcagccaagtcagtcgcgctcacgcgcaaggaggccgcggacgcgctggcgctggtgaccgccgagccgcgcgagctactggaggccgcggtgaaactggtcaagcagcacacagccgcaggcgcagcatatgccgccgtggtagcagagcctgaggagccggactgggtggcgccagaggacgacgaggcggcggcagtggagacggaggacgaggccgccggcggcgccgcgctcgcagagggcgaggagccgccgccggagcccgagccggagccggaagcggcgccggaggacggcgagggcgatgcgcccgcgcccaagattccgcgccccgtggactacagcaagaagtactttgcctacgtggccgccagtgcggggcaggagcacgtgcttgaggccgacctgtaccgccccgcgccgccgcccgaggacgccgacgaggacttcaagcccgagccgctgccgtacagcttccgcgtgctggacgagaagctgcccatgctgtatgtgcccaacgtggccgccgaggagcgcgtcaagttcttccgcaagttccccaagataggctcctaccaggcctgcggcgttgcgctgccggccagcggcgagttcaaggcgctgctggcggcggacacgctgttcccggagggctcgggccagccgctgagtgccgacgaccgcgactttgtgtgggaggtgtcgcagtcgctcagccgcgcgctggaggcggtgcaggcgcgtgccgccgaggcgctggcggccacctccgcggcggaggcggtggaggagctgaaggccaaggtggcggagctgcgcgagcaggcggcggcagaggccgcggcggcggcgccgccgccgcctgccgagggcgaggagggtgagggcgaggcgccgccggcggaggaggagccaccggcggaagaggaggcggaggaggaggaggaggaggccgaggagggggcggaggagggtgctgaggagggcgaggagggtgaggaggcgccgcccaagcccaagaagaagaagaaggtgttcaaccccattcccgggctgcaggccgccattgagaagctcacggccgcggcggaggccgctaccgaggccgacgcgcgggcgcaggccgccgtggcgctggagaagcaggcgctggatgaggtggtggcgttggcgagctcacactcggacgcgacgctttccagcctgcgcaacatgctgagcgtgccgcagggcacctaccacgtggtgaaggcgctgctgcacctgctgggccgccccgccgcctcgttctcgacctggaagcgcgcgcacagccacttcagcccgcggctgtttgaggacatggccgcctacgacgcaacggcggagcgcgacatggcggtgtggggccgcgtgcgcagctgctacaaggcggcaccggcggccaagaagctggacgcggagatgccgaacacgctgtttggcagcgtggctctgatgtacatcaagcaggtgcggcgggtggcgcgcaaggcagtgctgcagcgggagctggcggccaagctggccaaggcgcagcaggacctggccgacaagcaggcggcgctggttgaggcggagcgcgtcaaggccgagcgggaggcagaggaggcgcgcctggccgcggaggcggaggcggccgccgccgccgaggcggaggccgctgcgcgggcagcggctgaggcggaggcggcagctgccgcggaggcggcggcggaggcagcggctgaggcggctgctgcagcggcagaggcggcggcggaggccggagagggtgaggcggtggcggagcgagaggctgctccggctgaggccgaggctgctccggctgagggggaggcggcgccgccggcggagggtgagggggaagcgcagccggcccaggaggggtcgaacagctcgagcagctctagtgactcgtcgagttcggaggagtccaaggccgctgcggagtaa

SEQ ID NO: 139 - DNA, 396 bp, Chlamydomonas reinhardtii; identical to SEQ ID NO: 25

SEQ ID NO: 140 - DNA, 909 bp, Chlamydomonas reinhardtii
atggtaattacggaggttcggcaggacggcacaccggtggactggagcggctcacgcttggtcgggaacaaggactacactgttattgcagagccagcggcctcgattttccaggtgctccagaacggcaaaacagccaacaccatccggggccggccctgcgtgtacctgctgcgcgcccggctgaaggacgggcccaaggctggggagtgggtcaatgtgtacctcggctgccagcaatccgacacgctgagctactcgcgctgggacgcttacctggtccatggcaagtccctgcggtggtcggtgcgctgccaagcattgcatggccggccggggcccacacaggagccggccaagtgggctgggtgggcctggctgctgacacactgtgatgctgcagagctgcggttcattgacctgtctgggctgactaaggagcaagtcttcagggtggagcgcagcttccttgacaagtacgactttcccttcaactctaccgacaaccgctgctaccgcctcactgtcgcgaccttctggggcagctgcagcattcccaagatgcccatcgagctcaggcgctgggtgggggaggagtggtggtacgcggggctggcaaacctggagcagctgctggtggagcctggcgacctcgccaacagcctcggcaagcctgctcagtcggtggcgtgtgcggctgacggtgcattgaacacccggaacgagttcacgcaccctggcagcgtggctgccatggaccaggaggtctccgagatgatggagctcatcacgccgccggagctggaggacaagtgccctgaggagtgcatgttcctcacggcgtacgaggacatcaagaacgccttcccgcaccgcttcagccaggttggtggcgctcgacagcgttga

SEQ ID NO: 141 - DNA, 2325 bp, Chlamydomonas reinhardtii
atggtgcaaccagtctcggtcctcacgccaggcgtgcagagtggacttggtggactaggtgcttcgcgtcctggggcctcccaggcttggccgcgtcgacctgctgttctgagtacattcctgggcacctccatgctgtggcgtgggcatcgtgcggcttcttcgacgggtggccatgtggcgcagcatgtatgctcggcgtcgtccaagtcggggcgcacagtcaagataacccggcggcgtggttcaggccacagcagcagcggtggcacgggactggtggcggtgcccgccgacgggcccgccacttcgtcgggacgatacagcggcagcatgctgggctcggcctcacggacaacctccgggcggagtactacgtcggcgccgccgcaagtgcgggaagcggagtacctgagctcggacaatggcagcgctagtgacaccaacgcattcgcgtggggctggtgggagtcgctgccatcccgctacaaaatcatcgtgggcacggcagtgtcgtttgtcatctgcaacctggacaaggtcaacctgtccgtctgcatcatccccatggcccgcgactttggctggagccccaccgtggcgggcctggtgcagagcgccttcttcttgggctacatggtgtgccagctgccgggcggctacctgaacagcaggctgggcggccgccgcattctgcccgccggcgtgctactgtacagcgccgcaaccggcgtggtgccgtgggtggcggccagcgtgccggcgctgtgcgtgtcacgcgcctttgtggggttcggccaggccacggcgccctctgctgccaccgacatgattgcgcgcgctgtgccgcccagcgagcgcgcccgagccgtcactttcgtcttctctgggttccacgtgggctccatcctgggcctgctgacggcgccctggctgatccagcattacggctggcaatccgtgttcgtgacctttggcgcgctaggcttcgtgtggtggctgtggttcgagcagggcatcatgtcgcgcatcaaggctgaggagcccgacttcgccacccgcctggtgtccgactcgcgccgcatcgcgcccatgaccgacgccaacagcgtcacgtccgcctcctcctccgtagtcgtgaccaacaaggcggtggccaaccggggcgcaggcgcggcagccgccgcggcggcggcagctgctgccgcggcggagccgccgccgatgccgtggcgcgctttcctgcggagcaccccggtctgggcgctggcctacacacacttcgccaacaactggttccactacaccatgctcgcctggctgcccacctactttgtggacacgctgtctgtggacctgctgcatgcgtcccagaccgcgctattgccgcctctggccggtattgccgcctccgccgcggccggcgccgcggccgacgcgctcatcagccgcggcgtgcgcgtgccggtggtgcgcaagctggtgcagggcgtcgcctttctggtgcccacggcgctgctgctggcggcctgcacgccggccatcgcggatgacagcggcctgacggtggctgccatcacggtggcgctgggactgagcagcttcagcctggcgggactgttctgcacacaccaggacatgtcgcccaagtacgcgcccatcctgctgggcctgaccaacaccaccgccgccgtccccggcttgctgggcgtggcgtccgtgggctacctgtttgagcagacgcagtcctgggaggcggcgctgttcctgccctccgccttcttcatggtcacggccgccgcagtctacacgctgtgggggcgtaacgaccccatcgacttcgacgccgccgacaacggccccttcaggtttgagtcgcggatcgctgcgatcaagaaggccgttgacgacgcctttgactttggccagaagccctcggccggcactgatgtggagcgggaggtggacgtgcctgaggtgccgccccggccgccctccagcctgctgggccccctggccgacctggtccgcggcaccagcagcgccaccgccagcggcgacgacggcgacgagggcggcagcgtgcgccgccgcgtcggcggcgccgcccggaacgccgctggcagcgggcgccggaccagcggctccagcagctcgggcagcggccggcgcaccactgtcgggagccagagccggcggtcgaccggtgggagccagagcaaggcgactggcggcggccgccgggtgcaggaggcggaggaggaggggccgggcggcgtgtgggagcgactgcgcgcgctgctgggccagccccgcgagtactaa

SEQ ID NO: 142 - DNA, 360 bp, Chlamydomonas reinhardtii
atggagaagctacgcgccgcgggcaaggccgtggagaccgtgttcgtgagcggcgaccgcgacgaggcctcgatgaacgagtaccacagccacatgacgtggccggcgctgccgttctcggacaagaagcgcaacgacgagctcaactcgtgcttcgaggtggagggcatccccacgctggtggtgctggacgagcagttcaacgtaatcacaaccgacggccgtgaggccgtggcgtccgacaccgagtgcacgcgcttctcctggcgcccgcagcctactcatcagctgcgtggcggcaccatcgacaacatcaacgaaggtccctgtcatggtggtggtggtaggtgcggcggatga

SEQ ID NO: 143 - DNA, 1413 bp, Chlamydomonas reinhardtii
atggcgcctgccgtggtctgcgatggggacgtgtgccgcaaggtggacgctgaggaggccgcagctgccgcctcccccgctcctgctgcggccgaggagcccaaggtcttccagattctgggcgactcactgctcggccccaacggcactcaggtgcctgtctccagcatcactggtcctggcaaggtggttgcgctgtacttctccgcgcactggtgcccgccctgccgccacttcacgccccaactggcctccatctacgccaacttcaagaaggatcacgcacgcaaggctgactgggaggtggtgtttgtgagcagcgaccgcgatgaggagtcatttaaggagtactttggcgagatgccgtggaccgccctgccctacggcaagcgtgaggccaaagcacagctgtctaagctatacaaggtgcgcggcatccctaccctggtcatcctggatggcgagaccggtgaggtgatcaccacgagcgggcgagacgccgtcagcagcgacgagaagtgcgagggcttcccctggcggccgcgcacattcgagcagatcatggagggcgcggtgctggtggagcccaagacaggcgctgaggtgccggcgctggagcggctgcgcggcaaggtgtcactgctgtacttttccgcgtcctggtgcccgccctgccgccgctttacgccgcagctagtgacggctatggagaagctatgcgccgcgggcaaggccgtggaggccgtgttcgtgagcggcgaccgcgacgaggcctcgatgaacgagtaccacagccacatgacgtggccggcgctgccgttctcggacaagaagcgcaacgacgagctcaactcgcgcttcgaggtggagggcatccccacgctggtggtgctggacgagcagttcaacgtaatcaccaccgacggccgtgaggccgtggcgtccgacatcgagtgcacacgcttcccctggcgcccccagcctttcgagcagctgaccggcagcaccgcgaatcgtatcaacgatgggcccgtgctggtgctggtggtagatacggcggaccagaaggccgcggaggaggtggctaccagcgcgctggccgaggttgcggctgccaccaaggccgcgcccggtggtgacgactggggtttcctgtgggcccaccgcggcgaggagattgccaagcgtgtgctcgcgtttgcggggttggtgaaggactctgaggtggagctgccggcggggcacgcggcggtgatcattgacgtgcccaaccacgaggcagtatgggacctggcgggcaagggtgtggaggttagtgccgtggggctgagcggcgctgtgtcggacttcaaggcgggcaagctgggacccggcaagaagctcggtggtgagggcgatgacgacgatgagtga

SEQ ID NO: 144 - DNA, 2295 bp, Chlamydomonas reinhardtii
atgggttgctcgtcttcaaaggatgaggtggagctcgcccagcaggtgctgggtgcgaagaaggccgctgacaccaaagcggtgcggcgactgtcggcgctggggctggaagacggggaggtgtggatcacgcgccagaccacggatatacgcaaggtgttcaagtttgggcagcaaatcaacaaagggcagttcggcgtgatccacgtggtcacagacgcggcgggcaacaagtacgcgtgcaagcagatcagcaaacgcaagctgacagggcccaactccattcgcgacatacggagggagattgagatcatgcaccaccttcgcgggcaccccagcgtcatcaccttccacggcgtgtacgaggacgtgtcagacgtgtacatggtcatggagctgtgcacgggcggtgacctgtttgagaagatcgagaagatgtccactgtcacggagcgggcggcggccgcgctgttccgggagctggtggagtgcgtggcgtactgccacacactgggcgtcatgcaccgagacctcaagccggagaacttcctggtcacggaccgcaccggcgacgcgcgcatcaagctgtctgactttgggctgtccaccttcttccgcgaggggcaggccgactttgctgacgtgctggggagcgcctattacatggcgccggaggtgctggagcgcagctacggcaagagctgcgacgtgtggtcgctgggcgtcatcctgcacgtgctgctgtcgggggcgccgcccttcgccggggccacggacgcggaaattatcaaggcggtgcggagcagggatgtggacctgtccgccaagccctggcccgccatcagccgccacgcccgccacctggtgtcgcgcatgctggagaaggaccccgagcagcgcatccaactggaccaggtgttgacacacccctggctccggttggacggcaccgcgcctgtgcgggcggttcccacgggtgtgcgcgaccgcgtccgccagttccgcacgctcaacctgctcaagcgcgaggcgcgccgcgtcatggccgcctcgctgccgcccgaggaggtggcgggcctcaagaacctgtttgaggagctggacgccaacgccgacgggctggtgtcgctggaggacctggtggcggggctggcgcgcaggggcgaggcactggccggcgaggaggcggcggcgctgctgcgaagtatggacctgaacggcgacggattcattgactaccgcgaattcgtggccgccacctacacgctgagcaagctgcagcagagcgacgtgctgctcaagaccttccgccacttcgacctggacggagacggctacatcagcaaggaggagctggccgccgcgctggcccagctgcccgccgccgccagctcggccgcctcagcgcgagagagcgtcacggggctgctggcggaggcggacttggacaaggacggccggctgaactaccgcgagttctgcaccatgctgctggccgcgccggggctggaggcgggaggcagcgaggcagacgccaacgcggccgaggtgcaggcggccctgcggctgtccggaattgacctggactcggcggggctgccgggagccttgaatggcaacgcagcggcggcgctgccggcctcggcggcggcggcggtggcggctgcagtggcggcgggcttccggcccgggagccacagcaccaatgacacggcgtgggacccgagcttcggcagcggcaagcgcacgagcacggggggcggggtgcgcacaagcacgggcggcggcattcgcacgagtccgagcggggtgcaggcgagcatcggcagccggccgcaggcgccgtcgccgcagcggtctgggtcgctggcggcggcaccgccgtccagctcacaggcgtcgtcgcggtcgcagcagccatcgccgatggtttcgacatcgcaaatgggcatgctgcagcagcagcagcagcagcagcagcagcagcagcagcagcagcagcagcagcagcagcagcagcactcgcgttcgcagcagcactcgcccatggtgggtggccacaggctgtcgtcggcgcagtcacagtcgcagtcgcagcagctgcggcagctgcagcaacagcagtcccgcaagcagcaggcgcaacagcaacagccacaacagccgggcgtgtgggcagacgacttcagcgacgctgggccgctggactcggaagatgaagacatcatgaaggcgtcacggcggcagccgcagcaagtgcagacgcagtcgagtcagcagtcgcatcgggcgtag

SEQ ID NO: 145 - DNA, 1167 bp, Chlamydomonas reinhardtii
atgtcggagacggagaagcggaggggtggcattatcccgttccgcattccccttcccaacccgctggcctggcggccgcccttcattccgggactgggccgccgccgcaaggaccgcaccaagcactttgcgtccaccagcgtggtcagcgtggccaccatcagcgacagcgtgctgcaggcggcgggcagcggcgcgtctgcggccgccgcaccgccgccggtcaaggtggcgctgaagcccgccagcgacgtgttcgccggcgccctggctcgcgctgcctcccagtccaccatccacccgctggacacgctcaaggtgcggctgcagaccagcagggctcgtgccgcctcggctatgccgccgccgcccggactgtccaagattgggcagctggtgccgccgccggctgcacccggcggcggcgcggttggggcgctggcccgcttcgacggtcgtgcggtgctggcgaccctgggcagcctgtacaggggcgtggtgggtgctgccagtggcgctggcatcgccattggcgcctacttcgctgtgtacggcgtggcgtgcaacaccctgtcgcgctacaccgacctaccgcccacgagtgtcgcgtttgtgggcggcggcattgcggcgctgggcagctcattcgtcaaggtgccgctggcggtgtgcatccgcagcgtgcaggcgggcgtgtaccccaacgtgtttgcggccgcccgctccatcacgtcggcggccggcccccgcggcctgtttaccggctacctgcccacggtgctggaggacgtgcccgacatggccatcaagttcgccgcgtacgagagcatgcgacaggtgcaccgcgccatgaacggcggtcggaacgccagcgtgcaggaggacttcgccatgggcgccattgcaggcgcactggctgctgctgcgaccacccccctggacgtgatcaagaccaacatgatgtgcaacgccgcgggccggccctccatggcctcggctgcgtccctggtgctgcagcagggcggtccaaaggcgttcttccggggcgtgggcgcccgcgcgctgagcaacggcgtcaacagcgccgtgttctttgtgttctttgaggccatccgcggggccatcgccaaccgcgtcaagagccacccagtgcagattgagagttga

SEQ ID NO: 146 - DNA, 1182 bp, Chlamydomonas reinhardtii
atgtgtctttctttcttcgtgttggacgcggctgaagggcctcgtttcctgctcgccttcaaccgcgacgagtatttcgacagctccgaccctgtcgccccgcacacacacgccaacccctacacacacgccagccgcggcggcattaccaccgccttcctaacgggggacgcgtcgcccgcgaattttgcgcagtctctggacgccgcaaacttccacggttttaacctggtccttgcggaactggccgggcccgcgcccagcctggtgtacacacacaacggcgcgctggtcaccagcagcacagccgagccggccgggaactgtaaccgcagcggcggcggtggtggctgcgacgttaatggcagcaatggcccggttggggcccgcgaggatggcaaggatggcaaggagcagggcggccttgcggcggggaagcggcggctgctcggggcgtctacgttgggcgtcagcaacgggctgctgctggagtggcccaaggtggccagcggcgtggcggtgctgagtcagctgctgcccgagatacggcagggccagccggtgccctggtcccgcctgttcattgagctgctgggggacgacacccgactggtgccgcccagctgcggccggcagcaggagggggcggcggaggaggcgggggcgcagcaccagggagccagcacaggtggcatcagcggcggcggcgtggccgcagcccaggccgtggccccggctgacgaggtcgccgcgcacgtcggcagcggcgccgcagtgcacgtggacggccgacccatcgcaccagcaccggccggcgctggcgccggcgccggtgccggccacaaccgcggccacggccatggccacggcagcaatagcagcagcagcagcagcggctgtagcaatggagctggcgggaatggcggcggctgtagcagcgctgctggcggcggcggcgggggcggcggcggcgcgggtgacagctactttgagagggagctggagcacatcacgagcggccgctttgtggcggaggtggactcaccgtttggcaagtacggcactcggtcgcagacggcgttggtggtgtggctggacgggcgtgtggagatgcgggagcgggcgcgggagcccgacggcagctggcgcgagagcgcgctggacttcgccatttcgctgtag

SEQ ID NO: 147 - DNA, 366 bp, Chlamydomonas reinhardtii
atgtcttacttcgcacgatttacgcaggcctcgtcgatgcggcatgcggcagctgcctggcgcgcaggcgcgacgcagatgcatgcggcgcgtgtggcgatggccgcctcacagcggctggcgggcgggcccgtgttctccgcgccgccgccgccgccgcccagccccgcggccggcttctccagcagccccgccatgggcacctccttcgcggcctcgggccttctgggcagctccggcggcgcctccacggccttggagggcagcgacggcactggagagggtaacagcctaggcggcgcctcccataaagaggccgttctagcggttacaaagcgatgtaggaaacgacgcaaacgcttttag

SEQ ID NO: 148 - DNA, 2112 bp, Chlamydomonas reinhardtii
atgggccctggttggcccaaggagctcgaggacgcggccattgtgcaggccttcacccgctgccaccactccgaccccgaggccttctccatccccctgtacgccgcgggcgacgacaactccaagattgtggcacaggccttcggccgcgcccatacccatggcgccgtcgtgctcctgggctacagctggcgcgacggcccgcagcccggctggggcgatctgctcgcaaagctggtcaccgacttcgctgacggcgcctacacagcccacgccgccggccgcttcacgactgtggctgccgccaccgcctcctcccacgacgcggcggacgcggctgacatgggcagcgacggcaccgacaacaactcgccgtacgacttggactcgtcctacagccaggatctggatctggattcggtgctggagggcgctggcggcctgtccgacgaggcggcggaggtggtgcgccgcttcttgaccgccaccatgggataccctggctacccgggttacccgggttacccgggttacccgggctacccgggttaccctggcgtgccggcctaccccccgcccatctacatctcgccaccgcctgccgtgctggactcgcccccgcccgccactgcgccatcgccttcgcccgcggagtcttccccgtctccttcaccctctccttccccttcgccctcgcccgtctacccctctccttccccttcgccctcgcccgtctacccctctccttccccttcgccctcgcccgtctacccctctccttctccttcgccctcgcccgtctaccccactccttctccttcgccctcgcccgtctacccctctccttctccttcgccctcgcccgtctacccctctccttctccctcgccctcgcccgtcgacccctctccttccccttcgccctcacccatcgacccctctccttccccctcgccctcgcccgtcgaccccgctccttccccctcgccctcacccgtcgacccctctccttccccttcgcccgtcgacccctcgccctctccttccccctcgccctctccctcgcccgtcgacccctcgccttccccctcgccccccgtgtacgccccgccgccctcgcccgcaccccctgcgcccgcccgtgttctgttcatggattttgccaacctccccgccactggtgtgcaggcacccaccaggccggtggtgtggtacgacgatcccgacttcgacagcctgctggccgccagccccaacaacagcaagctgtggatggtgaagccggaccgggagccgtgtgttggctgcggccagtgcccccgggcctggtaccccaccaacaccagcgacaccaccaacggcttcaactacaccaccattgtggtttacttccgtgagccaatgctcatcaagagcgtgcgcctgaacgaggtctaccagccgggcggcgtgcagcagatcttcctgctgcagtggcccgccgtgcccgtgccgctcgtcttccccaacgccaccgcactcggccccgagtccgtcaagaagcaagacattgtgttcaacggccccgacacgaccaagacctgcccgggcgtgctgaatgtcgacgtgggcgtccagcgctccgcaatgaaggcacctgtgcgcaagggcttcacgcagaagcgcctgcagcgcggcctcaagaagcgtgccgtgggcggtgtgggaatcaccgtggcgctgccgctcccgagcgggccaggcggcagcaatggcaacggtaacggcaatggcaacggtcacgacaatggcaacaacggcaacggctggggcgcgcgccggcagctgcgcgccgctggcggcaacggcaacggcaacagtggtggtaatggcaacggcaacggcggcggtaatggcaacggtggcggtaacggcaacggcaacggcggtggtaatggcaacggtggcggtaatggcaacggcaacggcggcgatgactgggagcagctgctgacgactttcatcggtgacattcgcttcgatgggcgcgttctgtatcctcaggacccctcgatcttcgtgccttacgcgccgcccaagccgtacaacaagaagctcaagaacacggcgtaa

SEQ ID NO: 149 - DNA, 2577 bp, Chlamydomonas reinhardtii
atgtatgagcttggtcttgatatcgatggcaagccggcccatccggctgcaaccattgtgagcggcgacgactcgtcgctcgatggcatcgctctgagccgcgcgacgacaggtggtctgcttattgtggttggaagccctgccaaccttcataaaaccattggggcggcctttgatgtcggctcggatggtcgccgctgcgactctacgtccaacggtggctcggtcacccacggcagcaggccgaggctgcacgctgccgccgctacgctcttcggctccgaggacgctctggatgcggagtggccccagacactcgaggcggtcgcggtcacgcactccattgccgcatgcaacgtcggcggcgccgtgacgcaggtcccgctttacttctcgcccagcgatggaagcatcgtggcggtggccttcacctccgcctccccccgcaagcgcaccgtggtgtggctcggctacgactgggcggctgggcctcagacggcctggggtgccgtgctggccaaactcatcgacacgcacgccctgctgaccgccacctcctcggcggccgctgcctccctgtcctccgcatcctccgccactgccggagagcccaaggtcgtgcacatcaccaccacttcctcgtccgccgccgcctccaacaccggctgcggtagcggaacctgttcccacagccacctagtcatggccaccctggccgctgccgcttcgtcttccgccgcatccgcctctgccgcttcgtcttcagcctctacccttgcgcacaccggcggctccgagaccgagttcgcggctgatgcagccaaggatggtgatgacgctgccgcggagcccgtgttggtggatgacgcagccatggatgccgccctggactccatgccggatgctgtcagcgatctgtcagacggcgtcagcgaagtggtccgccgcatgatggcggccacaaccggcgccggcacgtacccggccccgccctccccggagcccgcctccccggcgcccccctccccggcgcccctgacgcccgcgccgccctcccctcggccgcccaagccccggaagtccccgccctcgccccccaccacgccgccccccctggcgcccccctcgcctccctcgccgcccgccccgccctcgccgccgcccccgctgccccccgggcttgctgccgaggtccagggttacaactccgacacgagcgccccgccgggcttcaacatcagcgacacactgtcggtgcagaacttcagccgcgacttctgtgagaatgtcaccagggccctggacccgcgcccggatgagtgtgtggtgttcgacatcaagagccacggcggcgccacgcatcaccaccgcctgctgagcgaggcgggcgcgctgcgtgtgtggggccccgaggacctggcagcggagcacccggccctggccgccgccggcatgagccgcctggtgcacctgcgcacctacagcgtgggcgaggcggagctggcggcggtgcgcgcctgggacctgtccgtgtcgctccccgtcaccgccctgccctcctcggtgggcggccgccgcagcctgcagcaaagcacccagaccatcaccctcgccttcgtggtcatctacctagtggaggtgcccctgccgccctcgccgccgccgcgggcgcccaacccgcccggcgtcatggagccgccctcgccgccgccctcgccgcccgccgcgccgccgcacccgccgcgctcgcctccgcggcctcccgtcaacctcaccgctcttgcctcagccgtgggcgccagcgcagtgtaccaggtcttcccgccgccgccctcgccgccctcaccgccctcgcccatgccacccagcccgccgccctcaccgcacccgccgccgctgccgctggcggaccgcatcacgtccgtccgtttctcccgcatggaggccgcgggcgcgcttggcagcaacaagcgtgtggtgtggtggaccgacggtgactttgagtcccagcgcaaggccgtgtggaacagcccgctcaacctggtgtggcgcggcaaggccgcctgcggcaagtgcggcgcctgcggccgcgcctggaagccgcgcggcgacaagttctcggtgcagctgtttttccgcgagccggtgcagcttgatgagatccgcatccgccaagtgtggcatgccggcgtcacggaggtgcggctgttggcttggccggccgtggacgccgtgaaccgcgtctccgacgtcttcctgggcgagccggtgctgcgccagaccgccgacaacaccacctgcaacacctggctcacggtagccatcccgcaggagcgcgccggcaccaaccagaccgtgcggcccatcggctcacaggacgccattccgccgaaactgcgcagcagcactgtgggcggcgtggtgatcaccacacgcacggcggccacggttcgtgccggcacctggatcgacgccgtggatttcagcgggcgtgtgctctatcccaacgacccggctgcgtatgccgcgtatgcgccgggcacgggtggcggtgcgaccattgggcgccggcggtag

SEQ ID NO: 150 - DNA, 1113 bp, Chlamydomonas reinhardtii
atggcgagcctggagcgcgtggcgagccaccgggctgcctcttgctcacaaatcattagcccagttcgttttggacgctggcagagcgtagtgcacgtctcgcggttggaccggcgtgtggccctgccctctcgcgtgctagtctccgcagcagctgctgatgtaccccagcaaggagcacccattacttcttctaccccttatgttcctactgcacatcaatcgattgacgaggacaacgtgttgacttcgttcattgccgagacgctcttgcccactcgccacgggaaatttcggctccgtggctacaagcattcgacggatggcggggcgaccttcaccgagcctaccgcgattgtgtccggcaaggttgaggggcaggaagacgtggcggtgcgcgtgcatgacgcctgcttcacgtcagaggtgctgggctcgctcaagtgcgactgcgcggagcaactggagctggcgctgcgcatgatccagggcgcgccgcccggcattgtgatttacctgcagcaggagggccgcggcatcggcctggccaacaagatcgccgcttactccttgcaggagcaaggcctggatacggtggacgccaaccgggcgctggggctgccggacgactgccgcgagtacacctcggtgcgcaacatgcttcaggacatgggcgtcaagagcatccggctcatcaccaacaacccgcgcaagatcaacacgctcaccaagctgggcatccaggtcaacggccgcatcccctgcctggtggcggcgggtgcgtacaaccagggctacctcgaggccaagcgcgaccgcatggctcacatgctgcccgaggaggaggcgctgggcagctcgctgggcggacccgagccggcggcggcggcggcgcagcgccccaacggcgcgggtgtggaggcgggtgagctcaacggcgacttctgcttctgggaccacagcggcgagcccacgcaggctgtcgctacggtgtacgccaagggtggtatggacctgccgcaggggctagcacatggcgacaacgggcgtgtggtgccggtggcggcagcgcccgcgggcagcagcagcggcagcgatgcgggctcgtcgtga

SEQ ID NO: 151 - DNA, 531 bp, Chlamydomonas reinhardtii
atggcggagctgcacgtcatcgggcaaatccagggtgctatcggcttccccagccagaacctgttctgcaagtggggagtcgctgcagggcgaagctgggagctactagagggtttggactctgggcagacgcaactcgacctggcaccagagggggagccggtcgtgtgggcccatccacttgacctccactacgcatgtcgcggcctagccggctggccaaagctatacttccaagtctggagccaggacgtacatggccgaaatgacatatgcgggtacggcttttgccacgtgccgacggcgccggggcaatacgagattgaatgccccacgtggataccggagggcactgcgggcgagcgcattgcggcgttcttcctgggcggcaatccccggctcaagtacgaggaggtggtgtacacgcccggagatcgcttccgcctcaacaccgtgtcggcggggttggtgcaggtgcagctgggcgtcattgtcaaggactttgagcgcaaccacgtgcactttgggtga

SEQ ID NO: 152 - DNA, 2712 bp, Chlamydomonas reinhardtii
atgcttcacatcctagagaagacagaggaggggcgtaacgctctgcaggagatgctggggccgcttcagcacctgcaatacctgcagcgcacagttcggcagcacgagttggatctcgactcgctcagccgaaatgtagacgagcggccctgggacccctacacagcctttgggctgcgctaccacccgccccacagcggcagcggcagcagcagcagcagctcgccgcaacgggcgcccagcaagcacgccagcaacaaacaccaccacaagtcggggtcgggttctacacacggcagcttcgccgcagctgccgcggcagccaatgcggcggcggaggcggcgaaggtggcggcggacgtggcggcggagatggcggcacgcggtcgcgccctgcacaaggcagaggcggcggacgtggcttcagggggtgacggcagtagcaagagtgatgcaagcggcagtagcagcaataacagagagggtcagaagagcggcggaaaggacagcagtaaaagcagcagtagcagcagcagcagcagcagcagcagtggtagtggcgggacgagccacagctacccgcgcttgaggcttagagaaaaggtggtgcgaggcagcaagcacccggaggagctgcagactgagctgacacggcgcaaggaggcggtggcggcggaggcggaggcgctacagcccagagtgggggccatgctggagcggctcaggggcttgctgcaggccgcggccaacagcagcggcctcgtgccaggcaacgcaactgcagaaacgcaactagcagcaggcgccggcaccgccgccggcgaccccaacgacattgttgcggatcccaacgacctggatctgtacgagctgctactgccgcgctgcgtcctggcgcgcctggatccaatcaactatgtgtcgtacccggcgcggcccttcgtgtccatcgtactgtcgtactcgggccggcggctgccgcacgttctgtacgaggttgcggagccgttgttggcgtgcgccgccggaagggacctgccgccgtggcctggtccggaggacggcagtggcggcggcggcggtgtcggcggcggcggtgctgccgccgccggggatggtagtagtggtggcggcggcggcgcggctggtggcaaagggccgttgaacgagccagtgtttttgccactgcctttagagatcctagtggcatttgacgaggtcagtgaggcggcgggctgggcggcggcggcggcggacagcggtggccgcatcatcccggtcttccggcccggcgtggcagacgtcagcgtcagtggcagtagcaacggcactagcggcagtagcaagactggcagcagcagcaacaggggcacaggccggagtgctgggagtccgccgccgctggtgcactgggccaatcgggtggcgcaactggctcagggcgagatactggtggtggtgcaggacggcgactcgctcctctcgccgcttggtcccgagggtgctagcggtggcaccggcagtagcaccagcgcgcgtgtgtgctcctggctgcacgtggcgctgcggacttttgaggcctggccgcagctgggcgcgctgggctcgggcgcctacgtcatggactggcaccccgccgccatcaaccggggacagcacttctgggataaggagcggcggctgccgctgcaatttgtggccgcggcactggccacgccgcaggcggcggagccgcgaggcggcgccgagctgccggcggcaccggtggccgtaaggcgggcggcgtggaggcagctcgggggcttggacgcggggctgggggctgccgctgcgtgtggcgcgtgtgcatggctggacctgtccacacgcctgtggctgggtggctggcaggtggcgcagctgcccctagacctgggcagttcctcgcctgctgccaattcgctgctgctgcccctggacgcccagaggcgcaacctgctcactgcggccgcccccgcgcccgacgcatccgggccagcgcaccggggcacagcagcagtggctgcggagggcgtcggcgacgccgaggcccgggctgggtccaggggccacggcgccggtggtgctggtgcaccggaggccgcggcgtggccccgcagcttggcggcaacaggcgtggcgccagcgggctgggtagcagaggatgtggcgtggtgtgagcggccggagctggcggcgcaccggggccggctggagggcgtgtgcgcgcggctgctgcagctgcggtacggcgcctcgccgtactggcacgacggggcggtcggcccgggcaatgaggatgcaacggctcagggtgagcagcgggctgctgctgctgctgctggggctgcgggcagcattggcggcagtagctttgaagcgggtgagctagggacagggaaagggacagcggctgggataccgactgccgctcgcgcggttgtcggggccgaggaggctggagcggaggacggtgcggagcccggcccgcagggtcggcggagcttgggctcaaggagggcgggctggccggcggcctggttcctgggcagtgacgtgcacgtgcttgtcacggagcaggtgaggcagctgaacctgctgtcgcccctgttccccctgcttgggtggccgggcttgggctccgcctgccctttcggtgcggctggatgccatgagccgcacgcaactgtttaa

SEQ ID NO: 153 - DNA, 2493 bp, Chlamydomonas reinhardtii
atgggcaagcgacggcgtgaggacgctgaggctgaagagcctgcagctgaagccgcggagccgcagcctgaggatgtggccgccgatactggcggcgcggcgcaggacgccggcgcctacgagggcggcgaggagggtgagggaggccgttatggacgccgcaatcggtcgcaagttaatcccgagacattgacgtacctggaggaggtcgtcggccatttccaaaccctggtcgacgatgaggagcgatcgctgctcgtcggcaacgtgcttgacgagctggcaggcaaggaggtcaaggtcggcagcgacccagtgtgcagccgtcacgtggagacgcttatggcttcggcacaagcggggcagctgctgcgcttcctgacctccgtgtcggacgtcgacggcctgttcacgcttgtaagcaaccccttcggctcccacgtggtcgagaagctgctggtgcgagtggagagccagctggacggcatgagcagtgaggagtacgacgagtttgtgcgggtgatgacgctgctggtcgacgcaatctgcccgcatctgtacgactacgccaccgaccgcttcgccacgcacgttgtgcgccgcctgctgtgcctggcggcggggcgcaacgtcctgccgcccgccggcaagcccaagggcaagcagcagcaggaccagtcgctgccggggctggagaacaagcggcgcaaaggcgaggtgctgggcgggctcgctgccaagctgggacccggcaccggcggctcgggcggcggcggcggccacggtgggcatggcagcaaggcggcggcgatggcggcggagctgctgggggcgggtgcggacgaggctccaccggcgcggttgccggagctggtgtccaagctggttggcgcggcctgcagcgacgacctggtgggggcggccatgggcgagatggtgtaccacccctacgcctgcccgctgctgcaggcgctgctgcgcgcggccgcaagcgaccgcaagctgctccgcgggctggtgcctgtgctgctgggcgcaaccgccttcaacgacagcgccaagggcggcgcgggggcggtgctggagggctgccgggacgaggaggtggcggcgctgtttgtggaccccaccgcctcacacctggtggaggcgctgctgcaggttctgcccaagtccatggcggaggagttcatcaagcgcttcatgacgccgcgtcttgccgacctggcgcaccacccctcggctaatttcacgctgcaggccgcgctggcggcggcgcccagcaaggacatggccaaggcgttgtatgagggcctgtccggcctgctgcccgacctgctgcgcaagcgccgcagcggcgtggtggcggcgctggcggcctgcctgggccggcacggcgtgtgccagcgggagctgtgcacggcgctgggctcggcgctggcggggctgccgcaatgggcacacctcaagggcgacgccgcgctggctcccgccttgctctgcctggactcggtggcggtggtgggcgccaacgagcccttcgccggcgcgctggcggccggcagcggcggcgacaaccgcgcgccgcggctttcggcagtgggctgcagcatcctgatccaggtgctgcgctacggccagggcgcatgccgcgccttcacagacagcgtggcggggctgcagccgtacgacgccgcccgggtgggcgccgaccccagcggcagccgcgtgctggaggcgctgctggagggcaacgcgcctgccaaggttaaggcgggcctgctggcgcggctggcgggccactgggagctggtggccagcaccggctcgggcagcttcctggtggaggcagcctaccgctccgcggatgtggatgtcaaggaggccattgcgggccggctggcgtctgccgccaagcaactcgagggcacacactgggggccgcagctgatgagcaaggtgggcgcgagtgcttacgcacgcgaccccgagcagtggcggcggcacgctgcctcggcttccaagaccctggacgcctttgcaaagatgttcggtgacgggcctgcgggtggcgccggcaagggcgcgaagggcaaggccgagcagcaccaacacaagggcagctcgcaaaagggcgaggaggaggcagaggaggcggctgcggcgggcccgtcagggagagacgccgagcttgaagcggggcttgggaagaagaagaaggacaagaaggataaaaagaagcggaaaggggaggagggggacgggcctgacgggcaagccggccgaagcgggcaaggggatgccggcgccgaggaggagacggcggaggtggaggagcaggatgcgacggccaatcaagggaagaagaaaaagcggaaggcaagggaggtggaggctgccgaagaggcgggcggtgcggcggatggcgggacacaagctgcggcctcagaggtcaagagggcaaaaaagcaaaagaagaaggacaagcagtag

SEQ ID NO: 154 - DNA, 402 bp, Chlamydomonas reinhardtii; identical to SEQ ID NO: 40

SEQ ID NO: 155 - DNA, 705 bp, Chlamydomonas reinhardtii
atgcagtgtgcaaggaagtcgatctcgacgagcactactcgcaaggctttcggcgccagccgtggctcggccgtcgtagtaaaggcggtccacagggaggcccccgcggccgccgacgtgccccgccgctcgctgctgctctcctcgctggcggccgcgggcgccgccgccgccacctcgctgctggctgcgccgctgcccgccgccgccgccgacccggtcacggacttcctccgcggctacacgcggccggaggtggggctgcaggaggcggtggtgatcctgatggacgcgcgcagcacactcaaggagatcgaggccctggctgccactcccgaggacagcgaggagcgcttccgcgcgcgcgccctgtggccgtccttcgccaagcgcctgcgcgccgtggcggaggcggcgccggtggcggtggcggcggtcacgggcgcggcggacaaggaggagacgctgggggagatgtacggcggcaaggcgggcggcgcgggggccgctgacgccgtgtacgcggctctgggccgggtgctcaccatcagcggccgcaccatccggcccgaggcgcaggccggacccgaggcggcggcggacgcggaggcagccatcagcggcttcctgggcaagctgccggcaccgctgctggacgaggcgcaggccttccgcgtggagcgggccaaggcggcggctgcgtga

SEQ ID NO: 156 - DNA, 420 bp, Chlamydomonas reinhardtii
atggccccctcagggaaaacatacggtgtcgctgacctgaagcagcacacgacagaaaagtcgtgctggctagttgtacacgggaaggtttacgatgtgaccgagttcctggaggagcacccaggcgggtatgacatcatcctcacctcgacgggcaaggatgccacccaagattttgaggagattgggcacagcaactctgcaaagaagcttctggagaagtacgtgatcggagagtttgagggtggcgacagcgctcccgccgtggccaaggtgcctccgcagagcgccaacgcggcgaagcagcagcccgctaagagtgcggcgacgcgaacattccacgtcatcctcccactgctcatactggcgctggcgctggcgctcaacttctacatgatgagccagaagaagtctgcatga

SEQ ID NO: 157 - DNA, 1260 bp, Chlamydomonas reinhardtii
atgaaggtcatcagctataacatattagctccgaagtatgcagggtacaacaactactgcccgccgcagctgctggcgtgggcataccggcgggagctggtgctgcaggagctgagccactacggggcggacttggtggcgctgcaggagtgtgacgaggccttctacggcgcagagctgggcggctggatggcggcggcgggcatgcagggcagcttcctgccgcggccggtgggcccggtgccgggtcccacggagggcattgcggtgctgtggcgctccgcggcgctggagctggtggcgccgccgcgcagcctgctgtactcggagctggggccggaggcggcggggctgccggcagaggtggcaggcacgcagccgtggctgaagctgcgggagctgggcgagggcgcggtgatggcgctgctgcggcaccggggctcgggccgcctgctgctgttctgctgcacacacctgttctggaaccccgtgttcccagatgtcaaggcactgcaggccgcgttgctgtgtgccgagctggccgcgtacagccggcaggcggcggcccagcagcagcaggaggaggtggggccggtgccggtggtgctgtgcggcgacttcaacagcctggcagagaagcggctgccggacggcttcgaccctcaggtgccggagggcgggcggttggtcagtggcgtgtacgaactcttgtcgggcggcgccctggcccccgagcaccccgaccacccgcacagccgcgtgtggcagccggggacgatggcgcgcaccgtcacgcccgccggcggcgagggagcgccgcgcttcccggcgctgccgctcagctcgtccgggttgcggctaggcagcctgaacgcgctggcattcgggcgggagccgcccgtgaccaaccgcaccgcccacttcgcgggctgtctggactacgtgtggctcagccagccccacctgcaggtggcggcggcgctggccctgccgtacgaggacggcggcagcccgccgctcacggggcccgccgccgccgacgcacctgcgggcgctgctggggcgcaggggcccggggaaaggggggaaactggggttacggggccaggggcgggggcgagggtgggggtgggggtgggcgctgcgcggccgggcacgtggcgggacccgctggctgacgtggccatggtggcggtgccggaccagcaataccccagcgaccacttggcggtgggcggcgaggtggtgctggtggtgtag

SEQ ID NO: 158 - DNA, 2463 bp, Chlamydomonas reinhardtii
atggcggatggcggcgccgccggccccaccagccgccgcccgcgcctggatgttgacacgtggaccgttcagctagaggagctgctggcgctgcaatcggtgtacgaggatgacatcagcattcttgcggcgccgggggctggcgcggccggcgacggccccagctgcagcgacggcagcggcgcgagcagtgccccggcgggcccgctgagcgccgaggagctgcttgcggcggggccgccacccgagctgctgctgccgccggacgaggcagagggcgctgactctgagggcggcggcagtagcagcagctgtgggtgcttcgtggtggaggcactggtgcacgtggacatgccggagggagggctgcagttgctgattgagatgccacccatgcggctgcagcagctacagccgcagccgccgcagcagttggcgcctgtagcagcgcctgtgacagccacgggcaccgctgccaacgcaggctctagcgctacagtcatcgcggcagccgcaggggcggcagtagccaatggcggcggcatgtctggcgctgggaagggcgccaatggcgcagcaggcggcggcggcggcggtcgcggcaggggccgcggtgacgccagcgcaaacggcacctcgcccgacaagggcgggggccgtggtcaacagggtaggggcagcagccggggcagcggccgcggcagtgggcgcttgcgcagcggtgacgcgcacgccacctcctcccagacaccttcaccgccgtccaagcaccagccggcggtcatgccggcgccggcgacttatgaggagcagccggcagctgtcagcggcgtcaaggcggccgtgcaggccgcggcgccggtgctggtggtggcggagagcagcccgccagtagctgccccagcagtggcagtgccagcggctgtgccggcacacccggcggctgaggcggagggcgagggcgtagttgaggcggtcgtgactgggcagcaggcggcggggcaggagcggcatgaggcgccactgctgatgccgttcggcggcacgctgcacttccttagccccatccgcctgacgctcacgctgccgcccacctaccccgccgtccacccacccgagctggacgtgcaggcgctctggctgtcggaggcgcaggccgcgcagctgcgggcggcgctgcgggcgcagtgggcggcggcgggccccggcacgcccatctcctttactctggtggactggctgcgaggcgaggcgctggcggagctgggactcactggcggcagcggtggcggtggcggtggcggtggcagtggagggaagctggtgctgaggcgcgggcagcagcagcagcagcagcagcagccggcggtgactggggcggcgggggcagcagcaggcggtgccaagggtggtggtggcggtggtggtcagagcctggaggcgctggcgatggcgctcgtgcgctactcagcgcggcgggagcagcacgtgttcgacgagtcactggtcagctgccccatctgcctggaccagcagctgggctcccgctgcgtgcggctgcccgagtgccgccacgccttctgcgttgcctgcgtggccacacacctgcgcacgcagctgggcgccggcgcggtggacaacatgcgctgccccgaccccgcctgccgccgccagctgccgcacggcgcgctgcagcagctgctgagtgccgccgagtacgaccggtgggaggcgctgacgctgcagcgcaccctggacaagatggaggacctggtgtactgcccgcggtgcagggagccgtgtcttgaggacagggatcactgcacgctgtgcccctcctgcttctactccttctgctccctgtgtgaggaggcgtggcaccccggcagccggtgcctggacgcggatgccaagctggcgctgctggaggcgcggcgggcgggccgcggcgaggcggcggcgcgtgagagcgccacggagcgggctcggcgcgaggtgaacaagatgaacgagctcaagagcctggcgctggtgcagagctccaccaagcaatgcccctgctgctccatggctgtggagaagaccgagggctgcaacaagatgacgtgcgcctactgcggcgtgtactggtgctggaggtgctgcaggatgatcaagggctatgaccacttcaaggaggacggctgcgagctgtttgaccaggtggagatcgaccgctggaacgcgcgctggaacggcggattgtttgaggctccccggcgaaacgaggtggaggataacttggcggcgttgcaggttgcccggcgcgtcggccagaaccttaaggagggccgcaacaacaacatccgctgctggtcctgcaacagccacttctgctacctgtgccgcacgtggctgcgcaaccggcccggcgcacacttcggcacgggcgccggccgctgcaagcagcacaccgacgactga

SEQ ID NO: 159 - DNA, 1185 bp, Chlamydomonas reinhardtii
atgcatttggcaggctctcgcagcgtgctcgctgggcagcgcgttggtcgtcgcacctctcattgcccaactgcctccaccagcgctgcagtcgtcgcgcaggcctgccctcacgtaacgaccacagccataacctcgcgcacctctagcgccatctacgctcatcgcgccacaacctcgagttcgctgggcacccgccaccgccatgccgccaccgtgcgacatggcaccggcgtcggcatttcggcagccccccgctccgccgcctcctccgcctccggccgcctgctgctgctgcgcggcgcgggcgcagcttcggcagttgcgcaccgcggccgcggccgcagtggagtggctgtagccgtgtccgccaatctgtttgcccgggttgcgcgcatcgtgaccagcttcttcaacggcctagtcgggagctttgaggatcccgagaagctgctggaccgagtggcggaggagatgcaggaagacatgatgcgaatgcgccaggccacggcccaggtgatggctagccagaagcagctgagcgccaaacagcgcagcatgcagtccagcgccgaccagtggctgcagcgtgcggagctggccgtggctcgcggtcaggacgacctggcgcgggaggcgctgaggcggcgcaaggtgctgcaggaggacgcggaccgcatgagcgagcaggtgaccctgcagacacaagcgctggagcagctgcaggccaacatccggctgctggagggcaagctgggcgaggcgcgctccaagaaggacacgctcaaggcgcgagccgccagtgccaagacgtcgctggcgctgcaggagatgatcggcgggctgcaggtccggtccggcagcagctgggccgcgtttgataagatggaggagaaggtggctgcgctggaggctcaggcgcagtccgccgccgcgctggccgcgccggactccctggagcggcagtttgcggcgctggagggcgacggcggcgtggacgccgagttggcggcgctcaagcaggcacgccgcagctaccccgcccccgcacttccccgggactccacggccgcgccctccgctgccccctcgtcggccccgcacgtggcgggtcggccactgcgtgacgtgtttgacccgctggagagggagctggaggagctccggcgccgggcgcgggagtga

SEQ ID NO: 160 - DNA, 1560 bp, Chlamydomonas reinhardtii
atgacggattcactcgccgcggacgcagcgaacgttgtgcgccggttcctggagacaggcgcgcccacgtatcccggtcccacgcccagcccatcgccgagcccgagcccgagccccacgccgacgcccagccccagcccatcgccgccgctggtgcaggtcgtggagaccgttctgaacgtgtcgtatgacctcaagtcggtgtcagcggagattgtcctcaacagcacagaggcggttgttggcaccgtagtggacatcgttgccctggtgcgcgaaagcattgcgaagactctcggcattaacttcacgcaagtcgtcattaaatcagtgtccgcgcgcattaacggcgtggaccaagtcatcgcgggggactggaacactctgcggcggcacctactccgccgcatggccctggaagagctccccgcccccgcccgcagcctggcagactccctgcccgccctgcacggcgcgcccggcgaggtctcacactgcggcaagccccgccccatcagccttgccgaggccgagcgaatgctggcgcagggctcggccctgacgtactcgtacgacgcgcgccgcatgcttcaaggatccggatctggaaactccttctctctagacgccatcaacattgacctgagcgtcgtgcagtacgtggaggtgccggtcgagccgtccatcccgccgcccaccaccaacggcaccaccaacggcaccaccaacggcacctcgccctcgccgctgccgcgtccctcgctcatccccatcaacaccacggcgctcacgcagattctcaacgccaccaccatcaatgccaccgttatccaagcgccctcgcccacacccacacccacacccacgccgccgccgcgcgtgcttttcgctcgcttcaagggtgccatggccgacggagtctacaccaagggcctggagcccgccaacgcctcgggcgtggcccccttcgtcatctggcgcgaggacgcggactttgacaactggcgccgccctcgcaaccgagccaacctggtccacgataagcacctgagctgcggcgccaacaccgtgggcacctgcaccacctgccctcgcgcctggcaggtcggcgccgacagcaccaacgccaccatcctcttccgcgagccgatgcagcttgaccgcattatcatcaagcagctccagaatcctggcgtgctgaccgtccagctgctgccctggcccgcggtgcgcatccccggcctcaacgccaccgcgcgcaccggcaccctcggccggcccatctggtccgtgacctccgacagcaccccgtgcggcggcagcctcaccatcccgctcggctcgcgcgccggcaccggcctggccgtgcccaagcgcggcagccagtcgcttatcccccgcaagctgcgcagcaccaccgtgggcggcatcagcatcattgtcaaggcccagcccaaggactgctccaaggcccccggctgtaccttcattgagtcggtgctgtttgacgggcgcgtgctgtacccggccgaccccgccgccgaccccagcactgtgtaa

SEQ ID NO: 161 - DNA, 714 bp, Chlamydomonas reinhardtii
atgcttgcccacacgaaccttaccagctcgggcgcgagcacggtgcgcccagctcataagcgcttccatggtcgcgtctccgtcgttccacgcgctgctgcgggtgcccccgcggccatctcggcggccacggatgcgctagcgaccctccggagcgcggcagccaagcccggctctgttaagccctcggacgtgctggcagcaatggtaacggtggagaaggcgaagctcaagccggagaactgggaggccaacctcacggcgccaggcacccgctggcggctcgtctacactgtgtccggtaaggacctgaccgctgcagccaagaagcagaaggccgggtcgggagcctacttccccatctccgcatgccagaaattcgacgacacgggttttgagaacggcgtgttcttcgggccggtggccaacctcaccttcaaggggccctggcagctggacgcgaaagtgtgtcacttcgacgtcaacaccatgtacctgggcctgggcccctggcgcctgcccatcaagctcaaagatcagacgccgctcaagcagatggccaccaaggagtttaaggcgctgccgttcttcgtgtacgcctacgtgggggaggacattgtggtagcgaggggtcgcagcggcggcgtggcgctgtggggccgagccgacgccgcctggctggccacctcgggagccatgcaggtgtacaagtag

SEQ ID NO: 162 - DNA, 19203 bp, Chlamydomonas reinhardtii
atgtttgagtcccaggttgcgtactacctggatcgataccttggccagtacctgaatggtctggatgcagcggcactccgaatttcggtctggcgtggcgatgtcgagctcagcaacctttcgctgaagccggaagcgctcgcggaccttgacttgccagtgacagtcaaggcgggcttactcggaaagctcacgctcaaggtgccatggaaggcgttgggtcgggagccggtcgtcgtggagtttgaccgcctctacatcctagccggacccaaggagcagcagagcgcgcagccatgcaagatgtccgtgtcagagtacgaggcggagactgtggctgcggagttggaggccaaacggcgccgcgtgctggcggcggagacggcatggctgcaggagctgcaggccaagctggcgctcaaggcggcgcagctcaagggccagctgcagaagcaggcggcggcggccaagtccgagggcggcggggggctgttcaacctgcaggcgctgatgcacacggtgctgggcaacctgcagctgcgcctcaccaatgtgcatatccgttacgaggacgggctgtcgctgccgggccagctgctggcggcgggcgtcaccctggagcgtgtgtcggcacacacggtagacgaggccggccgggagaccttcgtcacgtcgggggtgcttcagctgctgcgcaaggcggtggtgcttcaggagctgggggtgtacttcgacgtgggccgccccttcttggtggcgccccgcgccgactggtcctcactggtcatctacgagtgggacgcgctgttcctgcccgcacgccacgcccccggcagctctgtgcacccgcaccacttcctggtgatgcccatcacgggactcatgaactacgtgcgcaggagcagcaagacgctggcggcctccgccagtgccgcgggcgccaccagtgccgcggggccactgcccaagcaggagggccgcattgcgctgcgctccgtgagcctggcgctcagccggcagcagtacgtgggtagccgggcgctgctggagacactggaccgctacacggccaacagcccatacagggccatcaggccaaagggccggccggcggagggcgaggctgcacgtgtgtggtggcgctacgccttcttgggggtgcgcacgcagctgcggggcagccgggtggcctggacgcagctgcgcaccgcctgcctgctgcgcaaggcctacgtgcccgcatacgtgcgctgcctcgaggcggcgtcagcggcggcggccaagggcagtggtggcaagggccagggcgccgggcagccgggtgcgcccactgcgggtctgggcggtgacgcggccattgcggctatggacgcgcagctgccggagagcaccatcctgctgttcaggcgtatggcccacgctcagctgcagctgaagcaggagaggggcggcaccggactgccctctcgcggcgccagcaccacctcgtcgtccgcctcactgctgcagcagcagccggggcagcaggccgctgcagcgccagctggcgcacctgccgcagcgcccgcacaggatcgcacctggatcggctggtggcgcggcaccaacaaggctgccgcagcggcggcagcagcacctgcctcgcccggcggtgcgcccgcttcgggctcggtgtcgggcgggtcggaggtggtgatgggccccagcaccgcgaccctcagcccggaggagtggggccgcctgcaggagctgctgcagcagcaggagtttgcagacgacgacgacgacgacgcgggcggtggtcgcgacgggccctacaccctgcgcacactgctggaggtggctgtggagcgggcctccttggagctgaggggcgaggtggggcaggtgggcgcagtgcccggcaccgaccggccgcggcccatcctgctggcctccatgcggggcctgggtgtgcgggtgctcaactaccccaccgccctggcgctcaacgtgcggctgggctgggcgggcgtggaggcgccgcagggcatgctgctgtgcactggccagctgggcgcggcggaggggctgggcatggggctaggcggaagggtggcggctggaggcggcggcgagggaggcgctgtgttcggcggtgtgggcggcgggctaggtcggtccgggccgcccacccgcaccgccacacccgctctgcgatccagcactccgggtgggtcgttgaagccagtggcctccagcgccgcactgcccgccacagcaccagccgaggcggacgggcgggctgcagcccagccgtctgagccgctgccgtgtgccttcatgctggacttcatgaggcggccgcaggacggctctgctgacgcggtggtgagtgtgcggctggcgcccagctacgtcacctacaacggcgcggcgctgcgggcggtgggcgccttcttcagcagcagccagcaactgggcatcggcacgctgcaggcccaggccgccgcccgcgccgcccagctgcagcggctggcggccctgcggcttaaggcgctgtcggccgagcggccgcggctggcggtggcggtggtgatgcacgcgcccaaggtggcgctgccggacagcaagggtcgcgccacgctgctgctggacctgggctgcttcagcctcagctccgccacacccgacagccagggcctagctgcggacggcgaggaggcgggtctgtacgagtgcttcacgctagggcttgagcggctggaggcgggcctggtggggggagcctttgcatggccctccacacagccgccgcaggatgaagacggagacgatggcgccagtggcgacggcggtttggctagtggtatgacggctgcggccatgacacggtggggccccgccgctcgggcggtgcagacgggcggggctgcctcggacgcgctgttcggacccataccgcagaagccttcggcggcagcggcggcggcggcagcagcagcacagactgcaagccgcgagcagccgcagggtctggctatggttgcgggcatgactgccaatgaggaacaagaggcagcggcagacgattcagcggccggggccggccgcacggagtccccacagccccgcaaaacggccagtcgggcgagcagtgcgtgtggcagtagccatggaggagggacggaggaggagggcgaggagggcggtgctgcggtgcccggtgtagccgacatgggccatcacggtggtctggcggacctgttgcgtcagctggcgctgcaccgggcggcggcggcggcactgcagggcaagggttccgccgccgccggcgcctctgacgagcctccacctgagctggtgccgctgctgtcccgcttcggcgtgattgcggcgctgcaggtggccactgcgccgcacccccggctgccggctgtccgcacccggctggaggcctcgccgctggtgttccgcttcagcccctggcgcttccaccgcctcatggccgtcatcaacagcctggtggcctcactcagtagcggcagcagtggcggggggacaggcggaggcgcagccgacggagcggccggctgcaaagaggcccttcaggtgcggctgccgctgtgggtgacggacgccgagtacaccgcccccgtacagctgctggtgtgggagggggtgggcggtcgggtggccaagtggcagccccggcagctggtggtgtggcgcggccgcgtgtacctcagccgcagccccggcagcggcgtggtgtctgagagccgcagctactggcgcggctggcggctggtggagctgccgcccgaggaggtgggcggggccgagtgtgcggtggcgatggtgccggagggcgtgcggcgcgaggcggcggcggaggcgcctgagggcctggtgctgcggctgtctgaggcgcggcaagtggctgagctgcgccgcaatatgatgcggtcggcggccctggtggaggcggtggcgggatacatggccacggacgcgcacattgagtcgcctgactcacccaacgccacgaccggcacagcagcaggcagtggtgtgggcggcagcggctccgtgggcgtgactcgcgacctgctggatgagctgctggcgcacagggacgtgttccagctgtccggacgactgcccgcactcacactcaaggtgtcaggcaggccgcccagggcatggagggctgttcggcggctggcggctgcggagccgctgtcagcgggtggcacggcagcggctgctggcggcacgtacggcgatggcccggggccagctgcggaggtgctgggaaacatgtatgcacagcagcagggtcccgagtcacacgctggcacggacgtggagggcagcgtcgccggggcccgcggcccggtcggcaccaccaccggcactggcggcggctccacctcatcgctcagtgaggcgggggtgccctccgcgcctgcgtctgtgctgtcagcctcggccaggaccacccgatccagtcgcctggcgggtgggggccagctgccgccgcgtccgccgccgtcagtggcctgggggccggagggacctggcgactcggcggctggggggctggcggagccggacgcggacccgggggagggcggcggcgaggagggcgatgatgctttcgaggacgcggatgactacatggatgaggaggacagctcggaggcagatgaggatgaggaggacgaacgattcagcagcgacgccgccagcggacagcggagcccgggccggcggggccacagcactgccgtcgccgctctggaggccctgcggcacctgtctctggaccaggagacgccgctgctgagtgtggctctgactgaggctgacgtggcgctgcagtacagcgccgaccgactggcggtggggctcaccatgcaggcactgcgcatggaggatgagctcatgggcgccgcactgggccgccagttcgcagtcatggcgctgtcctcctcaggcccgaccgcgccgccagcatcagctggggccaccgcccctggcgctgaccccgccggtgctgacatccccagtgagtcagcgcacccatccgccattaactggcagccggtgcccatcaccaccgcgggccaggatgccagtgccggtgccgccagtggcagcgctgggcctgccgctgtggcgccgctggcgcagttcagcttcatcagcaactcctccagctccgaccgctacaagggtctggactcggagctgggtctgcagctggcgggtctgacgctcatgtgccaccgccccaccatcgccgctctcatggggctgggctcggacatggggtacgccaccgcgctgctgtccgccgagagcggcacgcagcagcaggccggtgccgcgcagcttgccacatctcctgcccctcctgctacggctgctggtgctgctgctggcatcaccgccccggcacagggcgcaggtgcaggtgcaggtgcaggcaacgacggccctgttcgtgcgggcggcgatgggcgcacgctgctgcggctgcacatcagcatgtcccgcctgcagctggtgatgccgtacgaggtgctcagcgcccaccagcgggtggagccggggctgacgcaccagcaggtggtgctgacgccgcggcagttcgcacaggcggccatggacaattttagcttgcgactggacgtgcggccgacctcgctggagctgtccaccagcctgggcaacttcacagcgcagtacggcgcactggcggaggagtcaccgtacaggaccatatgcagcctgcggccgggcagcagcgcgggctcgctgattgaggtggtgttcaggatgcactctgccgcggaggccgccgctgagccgcgtgtgccggccggcgccgcctactcgtccctggtggcccggctgagtgcggtgcaggtggtgtacatggggcgcttcctgaccgagctgctggcttacataaatggtctgctgtccatgcagccgcgggcaaggccgcccctcagccccgccacaccaccggccccagccgccactccggccacacctgcccccgcggcgccggcgcctgcacctggcgcccctgcccctgccgccagccccttcgtgctgctgatggacgtgcaggcggcggcgcccgtcatcaccctgccccagagcagctccgcggcgcaatacctcaccgcggacctggggcacctggtcctgcgcaacacagtgggctggaggcactgcggcggcgcggtggcgatggcgggagctggcgccgcgccaggcgtctccgtgcccgctgtgtcggatgccactggcgccggtgtgcggccgctacccatggtgtcaggtggcggcgctccaccctccgctggggacgccgtcggcagcagcgacagtggcggcagtggtggcggctggcgtgtgctgatggacgagatggtggtgcggctgcgggacatgagcctggtggtgggggcgggtggtggggtgccgcccggtcagaacatcattcgtgacgtgggtccgtccggccttgggctcactctgtaccggccactggcaatcagtggcggcggcagtgacggtggcagtggggctggcagctcggaccagccagctggcagccgccagccgcccatgccgccactgcatgcggcggtgagcatcccccggctgggcgccgtcatcagcgagctcgagtaccgccggctgctggcggtgctgtcaggcaacttcgctgagccgccagtcaacgacccccgagtgctggagctgcagcagctgctggccaggattgctgcggctgccgccgcggcgccacccagttcactagccccgcccgccagcagcagctcgccggctccccaacccagtggtgcggcacaggcgcagcagcagccgcatccacccaaggcggcggcggtcggcaaggcgggcgctggcggctcaggctcagctgacggcgcctccgccgcggctacccagcactccaacagtctaccccccagccggcggcctgtgttcctggacttcaaccgctccatccgctccgtgctggaggcgctgcaggacacctgcacagtggaggccaccgtgtctctgggcagcgcccgcctgacgctgctggtagaggcgacggacggcagcggccggctgctgcccctggcctccctgggcctggcagacctgtggctgggctactatgctacctcccgcggtgccatgtgcctcagcctggcgctgcccacgctgcaggttgaggacctgcggccctctgtggcgcccgagctgcggctggtgctgtccactcgctccacggcagcggcggcgctggcgtctggcggcgtggtgtcctctgcggccctgactgtgccggccatcagtggcctggacggcgccggctccagctccagccagctgcctcagccgaacccctcccttctgaccctggagtaccgcgccgtgccagccggcgtgatgccgcctctgccgccctccggcagtcagcagggagccaccagcaggggtgccgcgccgctcggcggtcctgctgcctcggcgccatccgctgcctctggcccggtggcccgcagccccgccgccactgcgctgcggttgcggctgcagcggcccaccgtggtggtggacttcaacgggctgctgctgcgcctggtgaacttcgtagcccccaatcccgtgttccagggcccggcgccgcgaccctttgagacccgcgacctgctgctgtcgccctccgccccctacctggcacaaggccgggacctgtggctgtcgcccgaggtgcggctactggcggacgccccgcccgcagccttcacagggccacagggcgcagctgccggcagcgctccggacactggctccggcggcgcccccaccacctacccgggcttcagcagcggcggcagccacatccacgtgtatgatggtggcggcgggcggctggtgctgccgcccgccctgccgccctccgagttcctgccgctcattgtggtgggcgcgggccgggcgctgcagctgcgcaatgtgcgcatcgtcaactgcgcctcgctgccgtcggtgctgcagctgggcgcgggggcgcggctggtggcacgtgaggaggacggcgtgaagatgctgctcgcggcgccggatgcagacaaggagtacgcggcagtgctggcggcggtggcggcggcggccgaagcggcagccgcggcgtccgcagcggcgacagtggcgggtggcacggcagcacaagcatcaggagggaccagcctgacagcgggcgccagtgtgccgtcaccaatcttcgaggtggcagtggaggcgctgggcgcggcaatccacatggtgggcagtgacggcgccgctgacggaggcctcggcggcccgggctcggccgccggtgcatcagcaagccgcggaggttcagctgctggcagctacagcgccaccctgagcgctgctctaggccagactgtgggctccggttcgttggctgcaggctcaggtgcagccggcgcaatggaaggtgcagatggcaccagcgccgtgcccaagacggtgctcaaccgtagcactactgacctcgcagctgccgctggcgataccggtgacggcgctggggtgggcatgggactaggatcagcgtttggaggcgtgggcgctgctgcggccaccgcggccatcctgtcctcccagcggctgcggcggcggctggtgctccagctggatgtgtccgccacctaccgggccgggggcagcgagcaggtggccgcggctcagttgcgcggcctcaccatacgcacactgaccacctttggcgggactgatgtgggcggcgggcttgtgcgtccggcggctggtgtcaccaggccaatgccgcccgcctccgcaccgctgtccaagaccgacagctcggccgcccacctgcccgacacgccgtcaggatgcgcagcaccggggccccagcccagctcgtcgctccgtgcgcccccgctgcagccgctgcaccatctggagcaccaccaccggtccgcctcactgaacaccacatacgccgggccggtgctgcccacccggtccactgccgcctcctactccgccggcgccgtggtggcgtccgtgtcggccatgctgctggagcccacggacgtgtccctgcgcttctccgccaccgccgcctccaccgacctgtccctggactgttccagcctgtctctgcggctgtcgcccgccggcctgcacctgctgctgcagctcaacgccggggccgccacccagctggcggtggcgcggccagaccagccgttggcgcgctgcgaccgcttcgagcgcatgtggggcagccacgacgccggcaccggcaccggctcgggcggcggggccacgccgttgcgtctggagctgggagtgggcggtgtggacgccatggcctcggagcgcggcgtgacggtgtggcggccgcagcccccactgggctatgtagcgctgggcgacgtgctggcggcggcccctgcagccccctccacggcgctcaccacctcggcctcggcccccatggcctcccacttctccgccgatctggacactcggcttggggcggaaccggacgtgtgcgtgtggcggccggtgccgccgctcggctacgtggccctgggctgtgtggtaggctacggggcctcgccgcctgcactgggcgtggtgggctgtgtggctgctgcggctgtagtggagtcgcggcttggcgagctcctgctgctgggcgagggcggtggcggcaactggtggcgggtgcagaacgcggcttgcacattcgaggtgtcgggggcgcctgagggcattgctggtggcggtggtggtggctacctgccctctgtgccggtctacgacctccgctcgccactgggtgtgcccccggccgccctggtgccactgcctgggctgcttcccttcccctttcccggcctcatcgccaccgaccacctgggccgactggtggggagtggcgctagtgcgggcatccccaccgccctcagcacggtgctgctgccgtcgcaaggcagtatgcaaccagctgcaggcgcatcgggcggtatgccgaggcccggcaccaccgcatctcccccggtggtgcccctgggtctgatgcgtcagggcagtgtgccgctgggtgtggtgaccggcagtgcgccgccgctgtccctgctgtgccagcagcgctacctgaggtccaggaggtcccagattagccgcgcggtgacccaggcctcccaggtgccgtgtgtggagttcaagaggatttggtgggacaggaacctggcgggggcggggccggccgcgccctcacagccgcacagccacctcagcatatggaggcccaggccgccagcgggctacgtgtacctgggcgacacggcagtcaccggcatctacgcgccgcccacgtcggtggtggtgctgcgggacagcgacccagcggccgcactcacagagggccgcccgccgccactggcccgccccatcaactacgtgcgggtgtggcatgacgaacaccgtgagcgcctgggcgaggacacgtatctggtgctgtggcgcccggtgccgccggcagggtatgtgccgctggggctagtggcgcgagtgggaccggcaccgcccgagccaggactgcccatccgctgtgtacgggccgacctggtagctgcggacgagctgcagcgcgcctcccccgactggttcgtgccggcgcacaagcagcgcatgccgctgtgcggctggctcacggaccgccgcaccggcaccttcacggtggtggtgcccacgccaggagccggcggcggcgcgccagctgcagaggggggcggcccccgggcagcggctgcgggcggcgtgggtgccggcggtgtaggcgccatgctgcaggtataccgcatgaagctggatgcggatgacgaggcgccacagccgccgcatagcacaccgtcgggccccggatccggcaaggcccaggcgtcagcttcaagcgcgtcagactcgccgtcattgccgcccgtttccaccaacctggagctgcgtctgggccgggccgcagtgacggtacgcacgagcctgggccgccccctgcttgagctggacgtgcgggaggcgcggatggggctgtgcacacagggcccagacgtcagccgcgggttcgccttcctcaccatgtccgcctggacgcactcgcccaccctgggcgtgtgggagccgctgctagagccctggcagctgttggctcacgtggatgtgaaccgcgcctcccggccccgcggcggtgtgggaccgggcacctgggtgcgcttcacatccacacagggctcggtgcacgtgtccctggccgccagcgcattgcgctcactgctggacgcgctgcccgaatggagcagtctgacggggccggagggcgtggccacggtgcggcggcagctggcatttggtgaggcaccagcgaatgcgctgggcggccaggtgggcagcagcggcgcgggcgggcctgccctgcagcaggggctggtgaccaacgcactgggctgcgaggtggcgctgctgacagacctcggcgatagacaggctgtgtcggagctggcgccggatgctgagggagtgccggtgctgctggcgccgccgcccgccgcgtctgctgccgcggctgctgctgcagagagccgcgccaccaacctggcgcctcctccagtgcccgccatccggctgctggctgatgcggtggccgcgaacgggctgtcgcctgagctgatggcggcaggggctctcatggtccgcataaaggtgaacggccccgcggcggagctgatgcccgagaccgcctggggcctgtacacccgggcggtggagacggccccgcctccacccctgcccgccccggcagcggatgaccccgatgatgccacgtgtgacacgcctcgctcctcagccgaaccctcttcggctgcctcgggagtggaggtggtgtggaacgagcgctttatcctcaagctacctgtggagctgagtgagcagctactgtgccccgcgcctggagacaaccagtttgccggtgtcccgctgcagctggacgtgtctctgctggcatgtggctccgcgggcgggccgccccgtgtggtggctgccggcaccctgccgctgcagtccgactggttgaccaacgaggtggacatcctgcgcaacacggcggctgcagcagtggcagccgccacagcggccggcatggcggcccccctgctcaacgagggcggggtcatcaactcggccgctgctaccggcggcgccaccggctccgtgaagccaccccagccctcgtccgtgagcgagacgctggatgtgcccctgtacctggtcactgtgcagtccggcagcagcaggcagccccgcacgcagcagctccagcagcggcaggcgctgggcaaggaccgggggccgcaggagtccatggcgctcaagctgcgtctcagcctggacgtgcagcaggtggacagcagttgggcgcccttcctgtccaagtcaaggcgaggccggccgggtgccgggggaagcgcagcgtcagcagcgctcagcggggcgggtggggcctcgtctgcggttgctgcggccgctgctgcgcgcggtgggcgacgggctatccggctggcgggtagtgatgtgtgggtcccgttcaaccagacaggcggcatcatcacggcgggtccgggtggtgacacgcttcaggcatcaaacacggtgcccatccgtgctggccccggcctggtgctagagcgcaccccgggccctggcggccagcccctggagctgcttcgctcgctggctgtcctgcacaactgcaccagtgtgcccctggaggtggcgctgatggcgggagaccccgaggtggccagctggatgctcctggcggacacacccgcgtccacgtcatcagccccaggccgtggagctacaggcagcaaggggtcccgtgccggcccgcctgcagccgccgctcctgccccaccggctggcagcctggcgcccgtggatgaggaggtgtatgagaaccagcgctacatgccgctcaggggctggggcgcgggcaacctgctgcctacggagcgcaagcgctacagccgtgccggtcacagctacagcaccttcccgctggtgccgctgccgccgggttgggaatgggaggggccgtggcaggccgagacagcgggccatgtggaccgcgacggctggttctatgccctggactggccgctgctgaggtacccgcccacgccggagcaggcgcggcgcaaggtgaccgacctggtgcggcggcgccgctggttgcggcgacgacgctgggtgggtctggccggccgcggcaggctggacagcgctgcccggcggctgctgggcactgtgcgccccggtgagcggctgccgctgccgctgggctgggaggctgagggcgtggagctgcaggtccggccggtgctggagctgccggcggagcccactgagctgcagctgccgccgaggaacccggcaagcgcggggccaacgggcggtgacacaggcggtggcggcggtggtggccacgacatgactgttgcggaggtcaaggcagtgcacgagtggagctgcggccccacgggccagagcggcctgctcatgacgtgcatggacgagggcggcgcccgcctgctgtgctgcaggaccactgcggtgccgcagcagggtgcggaggatggcgccggcccgatgcaggctggggcggtagggccagcagctgcggcagcagtggccgcggctgcagcaggcggcgctgcgtccgccagttccgctgccaacagtgcgtttgcggacctggccacaatggcaccgctgtccgcggacatggctgtggctgcggggcagcagcagggcaggcagggcgagttggacccgggtcaagccgcctggctgagcgtgagcctggagtgcgaggcgctggtggccacccgggcgggccttaccgcggctgaggggggcgctggtgcgccaggcggcctggacaccctggtggactggcgcctggtggtgcggccgcccctcacactgcacaacacactgcctgtgacaggtcgctacgtggtgtgggagcggccgcgcacgggtggtccgctgcgtgttcggcagcagggccgtgtagctgcaggtgccactgcgcccgtctacaccgcggacatgcgcatgcaggtgtttctgtcgtttgcgcctgacggctgcgagtatggcgaggcggagccagtgctgctgagcgacggctttatgcgcaatacggcgggggtggcagccgcggcgcgactgcccgatggcttccgctgcacctacacgcattctgcctccttcactccgctgcgtatcaaccttatccgcgacgtcgatacctccgccgcctcggggcccctggcctcactcagcgtggctgctcgcaaccctgccgctgcggccgccaacacatctggcggtgcggcgccggcacccggcgaggccgtggccggcggctacccgctgactgtgtcgctgcacgtgccgctgtggttcgtcaacgccagccagctgccggtcagctgcggcgtcatggcgctggcagtggagcaggaggcaggcgggccagcacggtcggaggactcagccatgggtctgccgcggtttgggccagctgtcaacgaccaggtcctgcgcatcatcgacaccgaggccttccgcaactcgccccgacccaacggcgccgtgtcggtgctgccgcgctcactggagctgctgtcctacccacccggactgcccaacagcatcatctacggcccgccacccagccaggaggccggcaacgcggctgtgcaagtggccatcctgctttccatcaacggctcgcgctggacacagcccatctacttgccgcgacctggggagcaggcgcagccgtccaagcggggtgtgggtggcgtgctgctgcccaatgaccgcatgctcatccgcgcgctggccaaggacggctgcattcacgaggtggctctgcgcctggagcccgcgccgctgtccatagtggcggccggagcaggtcccggggcagctgggggcgggggtgcgggaagtgcgggcgccaccctggtgcggctggaccaccacctggtgctggccaacagctgcggctacccgctgacactgctgcagcccgatgcggcggcggcggagcgggaccgggaccggacacgtgcgctgggcagtccggtgcactgggccgctgccgccgctggccgccgcaagttctgtctggcgctgcctctggctggcgagacggctgcgtccgcctccgcctacgggctgccggccagtgtgatgtggagcgagcccatcaaggtggacctgcccggcggccaggacacgcaggtggccatcccggtgtactgcctgggtccggtggggcgctaccactcggcgcactcgtccagcccagccgcgggcgccatggcgaccatggccgccctggccaacatgacgccgcagcagcaaagggcgtttgagctgcagagggcgcacgtcgtggccaggcagatgtttgcagggctggtaggcggcgaaagcacaggccacgggagtggcatggaccgcgccgggagtgctggcaagggcccgcagccgcagggcagcggcggcacgggtatgctgctgggtccgggtgtggggcctggcctggcgctgttgtcgcagggcagcgacaggaaggatgccaagaaggaccacgaggagcagcatgccgccgcccggggcccgtcacggccggccctggagcccaacctggtccggctggtcaagagcactgacatcggcagcgtggagtttttggctgtgctgcttaacgtgcgtgtggtgatccgggcgcccggttgcctggtgctctgggcggcctcactgggcggcctgccgcagcagcttatcaccaacgcctcgccgctgccgctcatgtggcggcagtcgcacccgcgggcagcatgggcacgtgtggagccctacagcgctgtgtcggtttgcaggggcgtgctgggcgatgggtggggctcgccacccgaggtggaggtgcgcgacaccgagccccagagcgagaacatgctgcttctcacctttgacaccgcctcgacttccacgacaagcgctggcggcccgtcggtgcggggcgccggcgtgactggtccgctaggtgccggagccgcgggtgacagcggtcgggcggttctggcaggcatgctgcgtgttggcgccaaccaccgcgagctgctggctcaggtggcgcccgcactggagctggtgctcacccctgacggcctcaacaacctgccgggaggcggagcggcaaaccaggggctgggcgcgtgccgtcttgatgcagcgctgaggatcgcgccggctccgccgcccattggcccagcgggtgccgggccccgcgctcccacgttcacagggccttacctcacgccagctgccctggccggcgtgtctcgcaacaaccggggcgcggttgcgggcgctggtgccggcggggcagcggctgcgggtggcgtgggtctaaacagcagtgtgcaccttagcctggaggtgggcagcctggagctcagcctcatagatgggcggccggaggagatcgcggtgctcacgctggacgggctgggtgtggaggtgtccacggggcggtcggctggctcgtacgacttctgggagctggggctcaaggtgcgcggcgtgcagctggacgaccaaacgcccggctcagcctacccggtggtgctacagccgctggacacaaccgcggcggcggcggcggcgcgggcgggcagcggcgagtgcatgttcgcgctgtcctattgctgccagcccggtaagatgcgctacgctctcaactgccccatcatcgccgcccgcctcctgcctctgcgggtgtctctggctgagccgctggtgtggcggctgtatgggcttgcgctcagcatcgcaccgcccgcgcccgctgccacagccagtgcagtgcagccgcgcggaggcggccgacaccaggtgtcggccagtgacatgccgctcgccattgacctgatgtgggtggaggacctcagcctgcgcctgtccttccgcaccgacgcctccagccgcccccgctgggccagtggcggcttcatccgcctgggtctggacctggcgcagctggaggacctcgcgctggtgctgccgggtatcgagctggagcgcgtgaggatgccgcgctccctgctgctgcagcaggtcttcacgcggctacaggaccgcctgttctccatcgttctggcggtcctgcgcaattacggagtggtgggcggcctcagcaaggtgctggccgtgtcgtcacaggcagcagcgacacttgcagcggacggtgggggcagcggctcggcccgtggcggcgcggccgggggtgcagctggtggtggtgggggcggtccggccagtggcagcggcgaggtccgtaacctaggttccggtgtggtggagggcggccgcgccatcgcccgcgggctgctgcagggtgccatgggcatcatcacaaagcccgtggagggcgcggagcagggtggggtggcgggcttcttcgaaggactcgccaagggcatcgtcgctgcgcctgtgagcgtggtcagcggcactctggctgccgcaagcaaggtgacggagggtgtggacgccacgacgcggaatttacggggtgctgcagccacggctgtgggcgccaagaagctgggtgctgcacgcaagcgactgcagcgtgccttcacagggagcggccgttccatgattggtaccgctatcagctccaccatcaacagcaccataggcgccctgcctgtgcacagcctgatgagcatgagcggtcgcgccagcggtcggcctgacctccggctggaccgctatgaggagcactgggtgctgccggggtccgtggtgctcatgattaccgaccggcgagtgctcgccatgcaggcgccggagtttgtggcactgcagtcagctgtcctgtccggtgagaccacccatgtgacggacgtgcctgtgggcgacgccatggtgttgtggcacctgccatggccagacatgctgtctgcggagctggcgtggcacaacaggacgccttccacagccggcgccagcaaccctgcaggcagcaggtcggcggcttcagcagcagcaacctctgtcgctgcagccaacccgcccgtgggcgctggtggcggctctgtggcgatgccggctgacgggctgctgctgcaccgcaagtacagggcggaggacgagcagctgctgtacgatgtgcgctgcaggcccgggacctcccaggcggcggaggtgctctcgcgcctccaggaggtgcgctaccgctgctatgtgctggcgcggcagcaggagcgcggctggcgggacaaccagagcagtgtgggcgtgtcgccggtggcagcagcactggcggcaacggcgagcgggcacccaagcagtggcactaggaccacagctgctagcggtgcgggcggcagcatcttgccagacaccatgatcagccaggagttcaagctggtgtggcgctccccaagcacccggctggccagcagccgcgcagtgtccttctggcggccagtggggcctccgggctatacaatgctcggggacgtagtggtgttgggccgcgacccgccaccgcggcctgtgcgcatgtacaaggacgcaccagctctggctgctgctgccgtgaatgccagcggcagtggtgatgcgccagcctcggagggcccccgcttggcgcctcctgtaggctggaccctggtgttccgcgacagctcgcagccaccgctgacgctgtggcgaccggtggccccgcgcgggtacgtggagatggggtgcatcgcctggccggagattgaggagccaccgctgggcctggtgcgctgcttacggcgggaccttgcggctccagggcgggtcttcgagagcgcagtctggggagctgccagctcggacaatagcttctggcgtgccagtgtgtggcaggtggatgcggctgcaggcacgtttgtcgcggtgaagggcgatgcaaagccggcacccgcgctggtgagggaggcggtgttctaa

SEQ ID NO: 163 - DNA, 2676 bp, Chlamydomonas reinhardtii
atgccgctatcgctccagcctgcccgtcaagggcttcgagcgcctgctaagcaggctcagcatgcgcgctccggaaagccagtcctgaacctgccgcgcggcgccacggtggctgccgcgcggtaccggattattgaggacccgcccgccgcgccgccgccgccgccgcccgccgccgtcgtggaggcgcccgcgccggccgtggcggatgtcgtgactgccgcgccggccagcgccgccgccgatgcggctcccgccatcgctaaccccttcgccgccgccatggccgccgtcagcgaggcggcggagaaggtgaccgacgccgccaccgacgccgccgccgccgtcgccgacgccgcatccgatgccgtggacgccgtctccgacgtcgccagcggcgccgccgacgcggtcgtggacaccgccgccaccgccgccgcctccgccgcctccgccgtcagcgcagtgacggaggcggcggcgccggaggcggccgccgacgcggtgtcgtcggctgtgtcggacgccgccgccgccgcctccagcctggcggcgcagcgctacctggagatgaccagcaaggcagccaaggtcaagcctggcagttccgctccttccttcgaggcgccctccttctccatgcccgacttcagcggcgtgcagctgcccaaattcagcgcgcccgatctttccagcgtcaaaatccaggttcccaagatctccctgcccgagtccgccggatccgggtccggatccgagggggccggcgccggcgtgacgctacccaaggtcgagatccccagcttcaagctggatctggatctgccggagctgcccgacgtcggcggcgccgccggcggcgccgctgctgacgtcagcgccgccgccgccgcggcggcggcggaggccaacgccgccgtcagcggcgtcttcaacaccgtcagcgcctccgtcggcggcgcggtgtcctccgtcagcgccaccgttggcggcgccgtcagcagcaccagcgccgccgtcggcggcgcgctggcggctggcgccgccgccgtggacgccgccaccggcgggctgctggcggaggcggaccgcgagctggcgggcgtgcggcaggtggcggacaaggcttccgccgccgtgggtgccagcctggagggcgtgagtgcggccgtgggctcagccacagcggccgtgtacggagccctgcccgcgccggcgcaggtgctggcccgcgacctgggcgaggtggtgggcgccttcgctgccaaccccgcctccagcctggtgctggcgggcctggtgggggtgccgctgggcgccaaggcctacctggacaggtacggcggctacagcggcgacttggcgcccgccgccgtgaaggagctgctggcgcgggaggacgcgctggtggtggacgtgcgcagcgaggcgcagcgggcggagtcgggcatcctggatctgcgcaagagctcgcgctaccgggccgccgcgctgcccgccgactcggtcaccttctcgcccaagtgggccaaggagcgcgccagcgacaagcagctgggtgtgctgacggcggcgctcctgatcgccaacctgacgcgtgtctccacgccgctcaccaaggtggtcatcatgaacgacaaggatgacgtggcggcccgcgatctggctcgtgcggtgcggcaggcgggcgtgctgcgcgtgtacgtcatgggaggcggcttccaggcctggcaggctgcgggcctgggtgtggtgtcgggccggaccgagtacgacgcctcggcgctggcggtgttcgcggacgaggtggcggaggtggcggccgaggtgacgcccaagctgaaggacccggccttcctcaccaccgcactggccacctccagcctggccatctacgcggcagccaactaccacaccaccctgcgctatgtggcggtgtggggcatcatggctacgatctacgcccgcctctccaagtacaactcgccgcaggagttcctggatgacgtgcaggccggcctagccgccgcctccgccgccgcctccgccgccgccgccgcggccgcgagcagcgccagcagcgccgccgccagccgcgccgcggcgcccgccgccatcgctggcggcgctgcctccgccgcctccgccgccgctgcgccggccctggcggcgcccaagcccgcggcgcccaagcccgcggcgcctatgattgccccggccccggccaaggaggtgtcttttgacgccctggctgcggcgatggccgcggccggcgccacgccagcggcgcctcccgcaccggcgcctgcgccggccgcgcctgcgccggccgcgcctgcgccgcctgcgccggcggctgctcccaaggccccggttgccgcaagcgacacgaccgccagcgccgccccggccgccgccaaggaaaaatcgcctgcggctgcccccgcgccggcgaaggcggagccagcccccaagccggccgccgcccccgcgcctgcgcccgctcccaaggctgcggccccggcgcctgctgcctcgtctgcccctgcccccgcaccggcccccgcgccggcccccgcgcccgcggcggccccttcgtctgcatcggtccaggacagcaagctccaagtgaaggtgtcggtggccccggagggcaccgccagcaccagcgactaa

SEQ ID NO: 164 - DNA, 1719 bp, Chlamydomonas reinhardtii
atggagcgcaattacgcggggggctactctggaggcgggcagcccagcaacctcgtttcttcaggccggcgtgccggaaccgttcggaccggcacgcccgatgccgccccagcggcgggcggctacgcgggcgcaggggctgcagatgatgcggcatcgcaccaggcgcgcttcggtcggcgggcgtcgcccggagcctacccctccggcgggggcatggacatggagccgccccgcggaggagccagcggctacaccccatccgcggccgccggggcgccgcgcgcagccggcatcccacgctccggcgcggccgcaggcgcctactccgcctcacccgccgcgtcctcagcagcagcagcagcagcagcagcagcgccacccccaggggcggcagcggcaggacccagtagcaagctctcggggctgcagcgcctgaaggaggcggcagcgtctcgcctggtcagtcgcatccccagtggggggcggcatgcgcctgagtctgccgggtacgtgccctcagccatgacccaccaggccccggcccggcctgcgcccctgcgtgccggctctggcggcggtggcggcgcctcctcgggcacctctgctgccggccggccaccctccactggctcctcaggctacggctacagctccagtgctgccgccggtgcagccgcgggccggccggggtcgggccggagcgcgtccactggagccgcgcttggcgccggcagcagggcacccggggcgagcagcgggtacgggtatgggtccagtgcggcgggtacctcgtccacctcggcgagtggacggccgccgtcagggagcggtgccgcgtccgcggctgcggcgtctgcagctcgcccctcggccttggcgtcgctggcggcgcggcggcagcagacggcggagccggcagcggctccgccgccgcgggcgcctccggcagcggctccgccgccgcgagcgcctgcggcagcggctccgccgccccgcggcctttcaggccccatccgcgcgccgccgccaccagccccggcgccctcgtatggcggtggtggtggaggctacggtggaggtggtggctttagcggcggcggcggcggcttcgatgcgggtaccattccgccgggtgcggacgaccccggcccgacgggccccatggtggagtgcccctcgtgcgggcgcaggttcaatgagcaggcctactccaaacacgccaagatttgcgagaaggtgtttgcccagaagcgaaagccggtcaacatggcagctaagcgacttgagggctctgaggccgccaagttcttcgacatgcgcaagggggtgcccaagagcgaggccaagggggcggcagggccacccggcaaggcagcgcccggccgaggcgcgggggctgctggcgggacgcggctggacgaccggccgctccccgggtccaagatgcccaagtggaaggcccagtccgagcagctgcggcaggccatggccgcaaacaagaggatcgcggacgcggcggctcgcggcgtggacatcaaggatgtcaagttcacgcccacgcccgcagagcaggacgaccgcgtgccctgcccgcactgtggccgcaaattcgcggagctgaccgccgaacgccacatccccaagtgccgggacatcctggccaaacccaagttcctgggggcaaagagcggacgcggcgcgcacgtgcgccggtag

SEQ ID NO: 165 - DNA, 1626 bp, Chlamydomonas reinhardtii
atgccttccaagcgccctcgctccgggcccgccaatgtcaagccgactccaacggagctccatgaggctgtcttgaaatgcactctttgcaacaagctcatcgacccagtggatgactaccggttgctggactgcggcgtttgcaatcgtgacgacaattgtgtccacgaagactgcattggcacgtacctcaagaaggaaggcagggaccaagctcagaagacgggcttcaagtgccctactacacttgccaatgggaagtcctgcaagggccacatctccaaatcccatccccatgtggcaagcaatgagaagaagaaggaggcacgcagggccccatcacaaccccgccacaactcgaccccccatggtggtgccactaaggccactgccaagggctctgttgtccaggctgtcaaggctgccatgacacagcagcttgtggtcaagccatcatcaggacccagctccacccgcttctcccctccccttcctcctgcccaaccaagcaacaacttcacgctgggtgacttcttcacctgggcgttgcctgctgccccttctgccaccaacacaacgcctcctgcccctcttcctactaccacaacctcctgtggcaatgtctggctggatcgcacccgccaggcttatgccaagggcctgactgtcccccagggacaccaggcccagcaggtggtcagtgcagagacacagctcctgcagcagctgagcgagcgcagtgaggaggctgaggacgcggttagctttgactctgctaacgagagcctcactttgtccgccaccagtgacagcacctccagcggcaccagtgtctccgtccccagcagtgccaccttgtgcatgctgctgggcaacctgtccttggatgcgcccacactgctgggcagccctggcaaccttggctcccacctgccttctccttcaatggacaagccccaggttcaggagctggtggtgcaagagctggaccaggtcagcactgtcatctgcagcaaggtggccagtgtcaccaccatccgcaacctgatctgcagtggccagctggcttggctgacacccgtggccacagaactgcagcaggtcatgatggcagcggcaggtggtggccaggtgctgtactgcagcctcatcaatggtgatggcagcagcagccttcccaatggtgacacaactgaccccattgtggctgtgcagcctgtctttgagctctccatcacccccaccagcctgcccagctgtcccatggctttggacctgacccagaccatgggtatgaaggtggttcgtgacccttgcaccctggcctgctacaaccctgaagactgttttggccctggctacagcctggtgggcttcaaggtgctcctgcctgaggccggtgaggagatggagggttccaacagcagtgtgtccaagcagtctgtagtggcccagggtgtgcctatccgccgtagccaaatcctggcagcaggtggtatggccagtgccagtgaggccccccaggtggccattggtgccaccccggttagcacccagtccttcctgactgagtcagatgatgagctggctctagagctaggtcgcctgtgtggctgcagctgctga

SEQ ID NO: 166 - DNA, 678 bp, Chlamydomonas reinhardtii
atggccctggacgcgggtgtgatgtcggtgacgctggagtttgccaaggacctgaaggacgcggactggttcggcaagcaagacccctactgcatcatccgcatcggtggccagaccttccgcacgcgcacggccgtggacggcggccgcaaccccgtgtggaatgacacgttccgcttcaatgtcatcaacgagaacaacgtggaggtggagatcaaggacgaggacgtgggcaaggacgacctgatcggcacgtgcaccttctcgctcgccaaggcgcgtgagagcggcagcgaccgcatccaggcggctgtggtcagcaagaagagccgcaagcagcgcggcttcctctccatcgccctcacctgggaacccaacaaggcgctcaagcccaccgtcaccacacagcccgccgcgcctcactatcactacatgccccacgccgcgcccctgcccgcctactacgccgcacctcctgcctacgccgcacctcctgtctacgccgcgcccgcaactcccatggcctactaccccagccctgcgcctcctgccggctactacgcacccgcgcaggcgcccacgtacgcggcacagccgccgcctgccgcagctgcctacccgcagcagccgcagcagccgcagtacgcgttttatcccgctgtgcccgtcgggcactag

SEQ ID NO: 167 - DNA, 651 bp, Chlamydomonas reinhardtii
atggccctggaagccggtgtgatgtcggtgacgatggagttcggcaaggacctcaaggatggcgactggttcggcaagcaagacccctactgcatcatccgcatcggcggccagaccttccgcacacgcacggccgtggacggcggccgcaaccccgtgtggaatgagacgttccgcttcaatgtcatcaacgagaacaacgtggatgtggagatcaaggacgaggacgtgggcaaggacgacctgatcggcacgtgcaccttctcgctcgccaaggcgcgtgagagcggcagcgaccgcatccaggcgcctgtggtcagcaagaagagccgcaagcagcgcggcttcctctccatcgccctcagctgggagcccaacaaggcgctcaagtcaaatgacaacgccgccgccgcccacgcgccccaccaccagcagcagcactaccagcaccccccgccaatggcctacgccgccgcacccccgcccgcctattacgctgccccgcccgctcctgcctattacgccgccccgcccccggccgccgcctactaccccgctgctgcctacccgccggcacctatggccgcataccctcctggcgcctaccctccccagccttacccgggtgcggtgccgccgggccaccggtag

SEQ ID NO: 168 - DNA, 768 bp, Chlamydomonas reinhardtii
atggcagccaagccaggtagcgcaggcggtgcggccccaccaccagcggcacccgcgcccccgcctgtgctggagaaaaagaccctcgcggagagccggttccttcggttcgtgaatgtggactacgcacggccaggggacaatgccaagtcttcatggcaatacgttgagcggacaacgcgaaggggcgacgtagatgcggtgaacattttcgcggtcctgaaaaagaaggacggcaaccaccaagttctggtggtgaagcagtaccgtcctccgatgggaaagcataccatcgagcttccagcgggtctggtggacaaggacgagtcgcctcagacggccgcgctgcgcgagctgaaggaggagacgggctacgtgggcaccttcattggcgccacgggccagcaggcgctcagcccgggcctgaccaacgagaacatgccacagaacgtcacccgtttgcaagcaccatatgcatcccccccccatccttccatgcatgtgcctggtgcccgtgcttgccctctggactgccgcttcggagcacacagggtcaccatcttcgccgagattgacccggagctcccggagaacaagaaccccaagcagagcaaggaggaccgcaagatgggcatcacgcgggagtggctgccgctgaagaacctgcaccacacgctcgcggcctacgaggcgcagggctggggcgtcttcgcaggcctgtacgccgtcgcgcacgggttctacctgcgggaacggctggggttgtga

SEQ ID NO: 169 - DNA, 1017 bp, Chlamydomonas reinhardtii
atggcttttcttcagcgactaggctctggtattagggatggtttgtcgtcgttgctaggcggcaaagacgagggcaagaagcacgaagtgggcaatgcgtccccgcagaggacgctcgcaaaaatcagcagccgtggaaatcgaccttcttccgcggcagtggggattctagagagccacacgcgcgaagccatcgccacctacgtgcaggcgaagtttgacaagggcgaggcgaagccgcacatgttcacgcagttctggctgcaattccccaagctggaggcggggtttgaggtgctgcggcgtcaactggaggcgcacacgggcagccgcgacgggccgctgccgctggcgctgctgcggacgcatgcctccgactttgggctgccggcgagctgcgccgtggtgcaggacctgtgcagcaagtcggctgtgcacaagtgccgcgacctcgactttgtgggcctggtgatgctgttgctggtggcgcacctgacggagccggccgccacctgcgccagcctgccggaggacgtgcgcaccatgctggactgcctggagctggcgttcacgcacttcaacagcgcgcgccggggcaagctggacaagcgcgaggtggctgaggcgctccagtacgagagcgccaaggcgcacatcaaggagggccgcggcggccgcaccagcaaccgcctggcgcacaggctgttcgaggggctggactgggagtacgacaacaccatttcgttcgagaacttcctgcggggcatcctgcagctgatctcggatgagttcggggacgacgacggcgacaatggcgacgagtacgtggtgctgacggagacgggcgaggccccgccggacggcgccaagcgcagcggcagcgtgcccacgacaccgggaggcacggcatcaggagggtcgccaggagcggcggggcaaccgggcacaccggggcgggtgtggggtgcgagcgcgagcggcatgggcggggccgcggcgccagccaatgtcgcgtaa

SEQ ID NO: 170 - DNA, 957 bp, Chlamydomonas reinhardtii
atgtctaaccgcgacaagctcgcagtggtctacctggtcaccaacacacactttaagtccaccgaccgcattgcaatgctcgctgcctcgttacggctggcggaggcgcacgtgctgcccaccacccccgccatgttttacatcttcacctcccccgggtctctggtggagctgcggagggcgcttcgacccctgctgcgggcgtctgccgacagcggccacatgcaggtgctgccggttccggacgacagctggcagctgccggaggcgggcaacgacacagcctactggcacgggcattggggcaagcactatcgcctgatgggcgactggcggctgagcttcatgccgcgattcgccagggacatgggccaccggtatgtgatgcagctggatgacgattcctacatcatcggcaaggtggaacagaacctggtgcagctgtttgactcgcgcaacatcagtctgggggctcagaaggtgctgcaggactggccgctggtcacctggggcctgcccgagctggccaagtacttcctgttggcctaccagctgcagcccaccacactgttccagcactgccggccgcccgggctggacggactgtactcggcgctggaccaacagtcgctggatgcagacccggaggcgcgagtgctgggcagtctgttccccaacaaggccgtccctcgctcgggcggctgggaccgcaccatcctgaacggcaactgcgtcatgatcagcctggacttctggttcagcagcctggtgcagcgcttcgtgcagctgtgccgcgccagcggcgggtccgtcatgtaccgatggaacgagcaggcggtgctgggcatggtggcgcagatattcgcgagccaggagcagctgctcatgttcagcttcccgtacgcgcacaggctcaagtacaaggacgcgttgagagcaggaggcttaaagccataa

SEQ ID NO: 171 - DNA, 546 bp, Chlamydomonas reinhardtii
atgggactttggatatctaaactgtggtcgctgttcggggaccaagaagctagaattctcgtgctcggtctggacaacgcaggcaaaacaaccattctataccggctccaggttggcgaggtggtatcgacaatccccaccatcggcttcaacgtggagacggtaacgtacaaaaacatcaagttccaagtgtgggacttgggagggcagacctccatccggccctactggcgctgctacttcccctgcactcaggccatcatctacgtggtggacagcacggacacggagcgcatcggcatcagccgggacgagttcaaggcgctgctggacgaggaggagctgcgggacagcctcatcctggtgttcgcaaacaagcaggacctgcccaacgcgctgagcgacgcgcagattgcggaggggttagggctgcacgacatcaagaaccgcgactgggccatcttcaagacgtccgcggtcaagggcgagggcctgttcgagggcctggactggctggccaacatgctcaagacgcgccggaaatga

SEQ ID NO: 172 - DNA, 5004 bp, Chlamydomonas reinhardtii
atgggcttgtttcgccgcgcggacgggccagcagtggtcgctgaggcgcatcggcacataccgctgggctcaagcctggacacagaggagcacctgccctaccgcggcaactatgcctccacaacgaagtacacgttgcttacgtacctgccgaaggcgctcttcgagcaatatcggcgtgtggccaacatcttcttcaccttaatggcggcgctgtctctcacgcccttcagtccgctcaggccctggacatgctggacgccgctggtgctggtggtgggtgtgtccatgatcaaggaggcgcgggaggactacaagcgctacaagcaggacagggaggtcaatgagcggcccacgcgcgtgctggacaggaagaccggtgaatttgtgacgataccatggaaggcgctccgcgtcggcgacatagtgcaggtgtgccgcgacgagtacctgcccgcagatctggtgctgctatccacctccagcgatgagggcacctgctacatcgagacgatgaacctcgacggcgagacgaacctgaagatcaaggccgcgccggaggagacccgcagcctggaggaggccgacctggtgggcctcaacgccatcatcgactgcgagggacccaactcgcgcctgtaccagttcacaggcaacctgcgcctgcgggcgccgctgccgcccaccgtggtcgcagccatggcagcggcgcaggccatggcggcagcggccaaggcggcagccgccgccgaggccggtggcggggaaaaggaaaagctcgagcaagaggggccgggttggggccgtgcagcggccaagagcctgcttgcgaatggcatggaggcgcacgcggcgacccttaagtctatggcgtcgacaacagtcgccgcgtcggagcccagtcgatggaacttccgtgcgtcgcagcggcgggccagcacacgcgtggagccgccgcacgagtatgtggcgtcactggccgcgtcggcggtggtgctgcgcggctgcagcctgcgcaacaccacctgcatctacggcgtggtcatctacgcgggccacgacaccaagatattcatgaactccaccgaggcgccctccaagcgctcctacatcgagcgaaccgtggaccgcatcatcctcatgttcttctgcgtgctgctcatctggtgcctcatctccgccgtgtaccacgcctggtggaccaacacccacttccgccagcactggtacatgcgccccgacgccctggacgccgactccgatccggacaaccccgcacagaccggcgccgtcaacttctttgtggcgctactactctacagctacttggtgcctgtgtcgctgtacgtgtccatcgagatggtcaaggtgttccaggctatggtgctcattgcgcaggaccgcgacatataccacgcggagacggacacgcccgcgctggcgcgcacgtccaaccttaacgaggagttgggcatggtggcggcggtgatgaccgacaagaccggcacgctgacacgcaacgtgatggagtttttcaaatgctccattgcgggcgtgccgtacggagcgggcattacggagattgagcgctccaacgcgctcaggaagggccaggttctggacgaccgcgagcggcccgacgcggccaagttccgcgagcgcttcttcaacttctacgacgaccgcctgatgggcgaggcgtggtacagcgccaaggaccccgtcaccatcgaaatgttcttccgcctgctggccgtgtgccacaccgtcatccccgacggccccacggatgagaagagcatcaagtacgaggccgagtcccccgacgaggctgcgctggtggtggctgccaaggcgtttggcttcttcttcttcaagcgcaccaacaccaccatcacggttcgggagcgcacgccgcgcggcaccacggacgtggagtatgaggtgctgaacatcctggagttcaactccacccgcaagcgcatgagcgtggtggtcaaggagaaggccaacgagaagatcatcatcttctgcaagggtgcggacacggtcatctacgagcgcctggaccccaactacggccccaacgaggacgccaaacaggccacgacccgtgacatggaggactttggagcgtccggcctgcgcacgctgtgcctgtcgtacgccgaggtggaccgcgactggtacgacgcctgggccaaggagtgggacgcaggcaagaagtctctcgacgaccgcgagagcaagctggcggaagctgcggagaagatcgagcgcaacctgcggctgctgggctgcacggccatcgaggacaagctgcaggagggcgtgccggactgcatccggatgctggcgctggcgggcatccgcatctgggtgctcaccggcgacaagatggagacggccatcaacatcgggttcgcctgctcgctgctcacggaggagatgcaccagcacacggtcacggcgtcctcggcgcgggtggaggagctggaaaaggcgggccggcggcaggaggcggaggcgctggcggcggagctggtggccaagcagctggacaagattgacttggagctcaggcaggctaccgaggcggcgaccggggcagccggcaaagctggtggcgccggcgcggggccgaagcagggcggcgctggaccgggcatcggcggcggcatgggcggcgatgccattgacgcggcgctaatcatcgacggaaaggcgctgagctacgcgctgtcaaaagacctggcgccgctgctgctgcgcgtgggcctgcgctgcaaggcggtggtgtgctgccgcgtgtcgccgctgcagaaggcgcaggtgacggggctggtgcgcagcaccggcagcatcacgctggcgatcggcgacggcgcgaacgacgtcagcatgatccagcgagcacacattggtgtgggcatcagcggccaggagggcatgcaggcagtcatgtcggcggatttcgccattgcgcagttccgctacctggtgccgcttctgctggtgcacgggcaatacagctacaagcgcatcacgcgaatgatcaactttttcttctacaagaacatgctgtttgcaataacacttttcacctactcggcattcacaactttctccggctcctacatctacaacgacacgtccatgacgttgttcaatgtggcgttcacgtccgccacgccgctgctggtgggcatgttcgaccggccgctgggcaagcgggccatgctgcggtacccgcagctgtaccgccagggcattgccaaccgcgacttcaacgccgccaccatcctgggctggatgttctcggcgctgctgcagtccggcatcatcctggtgctgtgcctggtgggatgccgcggcaccaccgcctccgcagaccacggcatcccctggagcatggccgaggtgggggtggtgatgttcacgtcgatcgtgctcaccatccacctgcacctcaccatggtggaggaggcctggacctgggtacaccacctggccatctggggcagcgtggcgctgtggtacctgtacctggtggccttcgcctacttccccgtgtcgtggagcctggagatgtggcacctgttcgagggcattgtggcgcccaacgcccagttctggctctacagcctgatcatacccgcggcggcgctgctgcccaacttcgccttccgcgccgtcagccggctgctgtggccaagcgacgaggacatcatccgtgagatgcagaaggtggagcgcgcagccaacagcgactcctcgcaccgcgccggcggcgcagctggggccgcagccggcgccgccagtgagcaccacgccctgcagaagcacaagggcggcggagggctgctcatggcagcgatgggcagcggcagcaaccgcgtagcgcccgagccgcccgcatcgccgctcggtggcggcgcgcgcggcggcggcggcgccggcgtcaagtcggcggcggcgattgccgtggctgagggcgggccagggaataagtcgttcgcggtcacggcggtcattgctgctggcggcgatggggctggcgcgggcggggctggtggtgggaagggcaagggcgggcggtggagcgcgactgggcaagatggcgttgaggagctggatggcgaggaggccgcagacgacgtcacggcggcgcctccacagccgccccctggcgccctgacgggcacccggagcagccgcgacggcaaccccaacggcttcagggtggtcggcaacaaggggcctggctcgacaatgcactcagcaagtggtaatggctcccgcgccgcaagtcgagcgggcccgtcaccctttgcagcggcgctggctccgccgcctccgggcgcaaccagcaacaccagcgggctagatgagctgacgctggtctccgccgacggcggcggcatcgacggtgccgacggcggcgccgatgggagggagtcgccgctgcttggctcctttgcaccatccccgacgcgcagcgtcgccggcccgagcgtggggcatatccccatcgccggccgcagccgaaccgcgggactgcccactgtgggcagctccacgagccttgtagggggagcgggtggggtgctggcaggcaacgggcaccactcgcagcgcttcgcccaccaggctcacctaccgcatgcggcgctggcgtcgtccatctcgacacccgtgcttggggaggacggcggccgcaacaacagcgggacgggccgcgccgctgcgggcgcgggcgcgggcgtcgggccggggtcaagcgcaacggcgtcgccgcgaacgcaggccgccgttgcgcgggggcaggcagggaccatgggcagcaggggcggcggcggcggcggcgagatgcagcctacggcttccatgtcgggcgggaggatggtggttggccaggcgtccggccagacgggcgacagcgccagcggcgtgcgggaggtgtctacattgtcccgggcatcgtcgtcatcggtgcagggatag

SEQ ID NO: 173 - DNA, 4254 bp, Chlamydomonas reinhardtii
atgccgaagggctgtccctccttccgtaagaggacgggcacggaggagacgaagcgtacagtgcacataaacgcgagtcaccatgagcacctggagctgctccaccagcactataagggcaatgccacttccaccaccaaatacaacgtctggaccttcctccctaaggcgctctttgagcagtacaggcgtgttgcaaacatctacttcactatcgtggcagcgctttcgctgacacctttctcgcctgtgcgcgcgtggacgacatggacgcccctcatcatcgtgttgggcgtggctatggtcaaggaggctgccgaggactacaagcgctacaagcaggacaaggaaatcaacaaccgtgccgtggaggtgatggacccggccaccggccagtatgtcaccaagatgtggaaggacgtgcgggtgggggacctcgtcgtggtgacaaaagaccagcagttccccgcggacctgctgttcctcacctcggagacggaggaggggacgtgctacatcgaaaccatgaacctggacggcgagaccaacctcaaaatcaagaaggcccctgatgagacgaaggacctgaaccagatggacttcgcgtccttcaagaacgccaccattgagtgcgagggccccaacgcgcgcctgtaccagttcacaggcaacttgctgctggacgggaagaccctgcccatcagccccgctgccatcctgctgcgcggctgcaacctgcgcaacacggacaaggtggtgggcgccgtcatctacgcaggccacgagactaaaatctttaagaacgcggcacccgcgccctcaaagcgcagccgcgtggagcgcatcgtggacaaaatcatcttcttcatgtttggcctgctgttctcgttctgcatcattggcgcggtgtacttctccatctggacggagaagaagtcgcccaaccactggtacgtgggctcagccaacgccacgggccagtacgcgcagtacgcccccggcaacccggctttcgtgggcttcgcctccttcatcacctcgttcatcctgtacggctacctcatcccgatttcgctgtacgtgtcgatggagctggtgaagattgcgcagtccatgggctatatcaacctggaccgtgacatgtaccacgcggagacggacacgcccgcgctggcgcgcacgtccaacctgaacgaggagctgggcatggtgaacacaatcttgtcggataagaccggcacgctgacacgcaacgtgatggagtttttcaagtgctccattgcgggcgtgccgtacggggcgggcattacggagatcgaaaaggcgaatgcgctcaggaagggccaggttctggacgaccgcgagcggcccgacgcggccaagttccgcgagcgcttcttcaacttctacgacgaccgcctgatgggcgaggcgtggtacagcgccaaggaccccgtcaccatcgagatgttcttccgcctgctggccgtgtgccacaccgtcatccccgacggccccacagatgagaagagcattaagtacgaggccgagtcccccgacgaggctgcgctggtggtggctgccaaggcgtttggcttcttcttcttcaagcgcaccaacaccaccatcacggtgcgcgagcgcacgccgcgcggcaccgcggacgtggagtatgaggtgctgaacatcctggagttcaactccacccgcaagcgcatgagcgtagtggtcaaggagaaggccaatgacaagatcatcatcttctgcaagggtgcggacacggtcatctacgagcgcctggaccccaactacgcgcctaacgaggagatgaagaccacaacctcacgggacatggagaactttggtgccgcaggcctgcgcacgctgtgcctgtcgtacgccgaggtggaccgcgactggtacaccaatgtgtggatgccggagtgggtcaacgccaagacgtcgctggaggaccgcgaaaacaaggtgggcgaggtcagcgagaagatcgagcgcaacctgcggctgctgggctgcacggccatcgaggacaagctgcaggagggcgtgccggactgcatccggatgctggcgctggcgggcatccgcatctgggtgctcaccggcgacaagatggagacggccatcaacatcgggttcgcctgctcgctgctcacggaggagatgcaccagttcaccatcagcgtgtatggcgtggaggagattgagaaggcggagaaggcgggcaacaaggagctggcggaacagctgagccacgcggcggtggccaactccatcaaaacgatcgaggagaccatgacctccaagtcggagggctcgcgcttcgccataatcatcgacggcaaggcgctgagctacgcgttgtccaaggacctggcggcgggcttcctcaagatcggcctgcgctgcaaggcagttgtgtgctgccgcgtgtcgccgctgcagaaggcgcaggtgaccaagctggtgcgtgaccacggcgacaccacgctggcgattggagacggcgccaacgatgtgggaatgattcagatggcgcacatcggtgtgggcatcagcggccaggagggcatgcaggcggtcatgtcggcggatttcgccatcgcgcagttccgcttcctggtgccgctgctgctggtgcacgggcgctacagctacaagcgcatcacgcgcatggtgctgttcttcttttataagaacatgctgttcggcgtgaccatcttcgtgttcaacgccttcaacgccttctccgggcagtttatctacaacgatttctacatgacgctgttcaacgtggtgttcacagctctgacgcccgtggtaatcggcatcttcgaccgcgacgtggacaaggccatggcgctcaaataccccggcctgtacatgcagggccagcgcaacgagtacttcaacttcaaggccattgcgctgtggctgctgtcgtccatgtaccagtgctgcgtcatcatggtgttcgtgctgatcggctgcaactccaccgaggtggaccgcgacggcggcaacccctacaccatgtggcagacgggcgtgctcatgtactcgtgcgtggtcatcaccgtgcacttccaggtggtgcaggtcatcgagcagtggtcgtggccctaccacgttgccatctggctcagtcagatcgtgtggtggctgtacctgctggcgtacggcgccttcccgctgtacttcagctccgacctgtacaacctgttcgtgggcatcgtggcgccgggcccgcagtactggctgtactgcctgctgatcccctgcgcctgccagctgcccgacttcttcgcgcgcatggtcaagaagctggtgtcgccgttcgaccacaccatcgttgcggagatccagaaaaagctgcagcgcgccggccgcagcctggcggatgagaggggccaggagccgccgtccatccttgccggcatcttcagcggccaggccaacaagaaccgcggcttcgtgccgccctacgacccccgctccaagttctacgggctggtcagctctggggcgcgcaactcgggccgtatcgacacgggcgtgcgcaacccggtgctgcaacacctggaccaggagctggcggacaacccctaccgctccggtcgcaagaaggggctgccggggatatcgccaaagggatcatctgccactgccgccgcggccagcgccgcgtcggccggcaacgtccagccagtggcggctgcagctgccaatggtgccgctgacgcagcggccgcagctgctgccgctgctgcggcggcgaccacggccacggcagccgcggtcgctggagcggctccccccgctgcgccgccgccagcagtaaggtccccggcggcgcgtgtgctgccgccggttatcccgccgggcggccaccccaacggccgcgcacccggccggctgccgcccatgggcacgccgccggtggggctcactggcgcggataccatgccctcgaacaacagcgatgcgcctgccgccagcagtgtgcccatgccgccaccgccggccgtgggcttggcgcccaacccacgctccaagaataagttgccgccgctcatccacggcggcgcctcgagcccggccctggcggccacggcagcggcggcgccgggtgcgattgccagccctggcgcacctgcactggccccgcccgccacggcgaacccgcaggagcgggagatcttggcgacatacacagacgctctgcagcgttaa

SEQ ID NO: 174 - DNA, 1578 bp, Chlamydomonas reinhardtii
atggcacgtagcacgtatgatgactttatcatcaaggagaaaattggaagcggcagctatggcgtggtgttcaaggtggtgcgcaaggtggacaagcacgtctacgccatgaaggaaattgacctccagggcatgtcccgtaaggagcaagaggagtgcattcgcgagacgcgcgtgctgtcgtctctggactcggacttcatcatccggtactatgactcgtttcttgagaagggcaagctctacatcatcacggagtacgcagccaacggcaacttgcacgattacatcaaaaagcaaaagtcccggctgacggaggacctcatatggaagctgtatattcagatcctgctgggcctcaaccacatgcattcaaaaaagattctccatcgcgacattaagacgctcaacgtcttcctcgatgaggacctgaatgtcaagctgggcgacatgggtgtggcgaagattctgagcacaaacacggtgttcgcgaagaccatcgtgggcacgccatactacctgtcgcccgagctgtgcgaggacaaaccatacaatgagaagtcggacgtgtgggcgttgggagtggtgctctacgagtgctgcacgcagcggcacccgtttgacgccgacaaccagggcgcgctgatcctcaaaatcctgcgtggcaagttcccgccggtgtcggggtactcgccagacatctgcgacctcatcaagcgctgcctcacacagaacgccaaccggcgacccaacacctacaagctgctgctgcttcctagcatccggcaaaagggcgaggagctgggcatctcgctgcccgaccaggccagcctggcgctcatggcggataagaacatggcgaacgcgggcgcggcgggcaaggcggcacggcccaagacgccacaaggcgacatgaacgctccgccggaggtggcggggacatcggcgggcgacgacaaagcgtttgtgttcgggtcaacgatccgggcagacggcgcgggcgcgcggccggtggacgtgtcggtgtcggcggtggaggcgacgtcgggcgagggcgcggcgccgggtgcggcgcccgtgccggtgcaggcggcctgggcggtggacgacgcaaagcccaaagtcaaccgcccaccagcatggggcttggcgcagcagatggaggagctggcggtggatgacggggaggacgaggacgagggcaagaacccctacctgggtgtgggcggcgacgacgacgaggacgatgacggagagggcgatgacgacgacgactacgacgacaacggggagtacggcgacgagccgggcgagggcgagccgggctggtccgccgaccccacgcgcatcgcgcacatgaagagcgccatgatgatccagcgcgcggcgtgcctggacctggtgggcgagaaggccttcaacgagctgtatgcgctgctgaagagcaaccaggtggatgaggcgtccatgacggacctgtcgcgcctggtgttcaagatcatcccgtacgacaagtccgaggtcatccagatgatgtacaagctgctgtacctggagtcgcagctggaggggcagtga

SEQ ID NO: 175 - DNA, 1224 bp, Chlamydomonas reinhardtii
atgctgctcgcggcgcaatcaatgccaaagtgcatatgggataacgttaccggcgcgttcggccagtgtgtcgcgaacgactacacgctgctgtccatgagcggaaaaccaccgactgaatccgccaggctgttggcgtacgcccagcaccgcgcagtgctgtgcaagcggctcacgagcgaggcggcgtgcctcctagccatggacctggggtgtggctgggaccggctggccggcctatgcttcgcctcggacgcggcgctgctcagacccgaggtgctgcaagggcggctcttctgcggcggctccctactcgaccaggcgacccgctgcctgctactgccggggcccagcaacggcagcagtggcagtagcagcggtggcgggggcggcagtagcggcaccggctcggtcgcggcaaccagctgtagcgccgctcacaccgcttgcacctacctcagcccaacgcagctggcggcggcgttggcggcaccggcggcggcgacggcggctccatacctgcggctggcggcgctcgccaatttcaacgactggccgcctccagagggcagtggcgcatgtgtggccaaatggttgacgcaacccgacacactggcagctctggcgcgcagcgtctccgccaacccaacggtctggttgctgcagccagacctggtgggctcgggctgtagcagcacgctggcaggagcaaacatcagcgcagcacccgagatggcgcgggtgacggcggcagtagcagcggcggcgtccgcgtgtcaggcagcgggcgtcgccggcggcgcggacggctgctcggcggcggaggatggctgcgactgggctgatagcggaggggcaaccggcggcagcagcacaagtagcggtgatagcagtagcggcggcgggacgtgcagcgtgggcacggcggcgcttctggatgcgttgtttgatccacaagacgcctgggtgagggcgcttgatggcacgaccgccctctgctccgcccagggcactaccgccagctgcgccgccgccggatccattatcgtggatccagcccggctcgacacgtggcgggacgtgctggtagacggcggcggagattgggtggacggtggcagcggcggcgcaggcggcctggcggcggggcaggcgctgccgctgctgcgctggatgctggtcgtgtgggtggtggtgtttgccggcatggccgccgtgtattaa

SEQ ID NO: 176 - DNA, 693 bp, Chlamydomonas reinhardtii
atggtcgctggagggttgcagcccccaagcattgacgaggaggaggctgcggcgcgcgctgtgggccagggcgttatttttatcctcgatgatgctcagttagaggttgcgcaagtcggcaagacctaccagctgctgaactgtgatgaccacgcgacatatcttcgaaagcacaaaaaggacccggcgctgtaccgcccagacatttgccaccaggcgcttctaaacgtgctcgacagcccgctcaacaaggccgggaaaatcaaggctgtgtacgtgcgcacgcacaagaacgtgctgttctccatcaaccccaagacgcgcatcccgcgcaccatcaagcgcttctccggcctcatggtgcagctgctgcagaagctgtccatccgcgccaccaacggccctgacaagctgatgaaggtgattaaaggcccggtgactaagcaccttccgctcaactgcaagcgcgtgggcttttcattcgccgcagataagcacgtggccatccatgagtacgtggcggggctggaggacagcgggcccattgtgttcgtggtgggcgccttcgcgcacggcaagatcgaggcgccctgggtggatgaggagctaaacatcagcgagtacccgctgtcggcggcctactgcctggcgcgcatcacgcaggcgttcgagatgaagtggaagatcgtgtaa

SEQ ID NO: 177 - DNA, 1170 bp, Chlamydomonas reinhardtii
atggcggaccctggggcccaacctgtcccagctccccagtctgcggaagagccggtcaccggaggccttcaagagtccgtggaagtcacagcgtcagggaaattagactcatacaaccgcgagtacaaccaattcctggtttgcggcagcctctttgagtgccccgctaagtacctgcccatcaagcccatcggcaagggggcgtatggcgtcgtctgctccgccaagaacctggacaaccaggagaaggtggccatcaagaagatcgcaaacgcctttgacaacgtcatcgacgccaaacgcaccctgcgcgagatcaagttgttgcgccacctgcagcacgagaacattgtgcagatcaaagacatcatcccgcccaccaaccgcgatgccttcaaggacctctacgtggtgtatgagctgatggacaccgacctgcaccagatcatccgctcgccacaggcgctgtccaacgaccacagccagtacttcctgtaccagctgttgagagggctcaaatacatccacagcgccaacatcctgcacagagatttgaagcccagcaacctgctcgtgaacgccaactgcgacctcaaaatctgcgacttcggccttgcacggaccagcaccagcaacgagaaggagttcatgacggagtacgtggtgacgcgctggtaccgcgcccccgagctgctgctgagctgcagcggctacaccactgccatcgacgtgtggtccgtgggctgcatcttcgcggagctgctgggccgcaagccgctgttccccggcaaggactacgtgcaccagctgtccctcatcaccaaggtgatcggctcccccagcgaggaggagcttggcttcatcaccagcgagaaggccaagcgctacatccgctcgctgccgcgatccgagcgagtggacttcgggcagctgtggccgcacgtcaccaagacggcgctggacctgattgacaagatgctggtgttcgaccccaccaagcgcatcaccgtggagcaggcgctggagcacccctacctggcctcgctgcacgacgtgtccgacgagcccgtgtgccccacacccttcaccttcgacttcgacagcgagcacctcacgccggacgtggtgcgggaggtcatactgcaggacatggccgagctgcacacctga

SEQ ID NO: 178 - DNA, 1872 bp, Chlamydomonas reinhardtii
atgctgcagagcctgctgatcgtgctgctggggtgggcgcgcgaggagcacgtgcccctgcgggcgggtgcgctggcggctgcagaggctgcgctggcgctgccggacatgggcatgcccagcatacccggccgggccatctttgctttcctcaaggcagtggaggtgccggtgctggtgctgtgcgacgagatgcagcggctgttcctgccgctcatcggcggcgccgagccggacgctgccggggccgcgtacatgcgcgacgtgttcatgaagcagctgctgttggacggcccccacaccatgctgtggtgcctcacgggatcatccatggcgcacacctgcatcagcatcgcgcgcatgccccccaacggctacccgctcatcaccatggcctgcgccatccacctgccagcgacctacagcgccgcgcacgtaagcttcgcgtggcagcagctgcagcagaacagcggtcctgatgtggagctggaccgccagctgctggagctctgcccgcagtcaatcccgctcctgacgttcttggtgcacacatggttgtacaaccgcggccgcagcgacgtgcacaccttcgtgcgcgacttcatgcggttcaagctcatggagcaggcacgcagggagtggacgcctggcctggaggccgtgccggcgtcgcagcggctcacgatcctggacctgtcgtttccggccgtgggggcgcgcatcgacacagggctgcaccccggcttgaagtactacctgacgccgcacctggagaagagggcggacggccactacttccttcgcgactcgcaccagcgtcagatcgtgcggttcctgatcaacgaagaaggcgcgctgcggagcggattgggcgagctggcgttcagcgcgaccctgacgcagctggatggagggtggaacctgtttcacctgggggaggccgcggactacctgctcggtcccggcgcatgccgcaggtggcagaacggggagccgccggctgagacggacgcgttcgaggacaagttacaggccattgccgacgacgtcgccgtgaagctgtgcgcggcaggagcggcggcggcaggaggcgatcagcagccgcagcagcaacagcagcagcagcagcagcagcagcagcagcaccaggagcaaacgcagcagcagcagcagcagcagccgggcagcggcggcggcggcgcggcgctgggcccccagccgggcccccagccgcaggagctgtgggagcggcagtcctggttccaggaggcgctgaactcggagtggaacagccgtgatcgcgaggcgtacatggaggaggaggacaacaagcaggcgcggcgcacgcacctggccatgctggtcttctacctgcggctgagtcgcaacgtgcttggccgtacgaagccttgggatcgggagactggctccaagctgctggatgtgggggtggttgaggcgctgcccggcgtgctgggccagtccctctttgccttcaacgaggcaatggtgggggcgctgcggctgctgccgcgccccaccgtgcaagccgccgctgcggcgtttgcggcggagctgtcaggcggcgtttgcggcggcagcgttgatgagggctcgggcgaggacgacagcagcagcggcggtggcctgagcagcggcagcggcggcgccggcagcaccagcggcggcggagggcgggggcgcggcgcaggggcgatgcctatccaatgcgcgccttcgcgcccggcgggaccagcggcggcggcaggatgtggtcagcgcccgccgctggtgtacgccaccggcggcagtcgcggggggacggccatccgcggccccccctcaaggcccaccacacgccacgtgtgttag

SEQ ID NO: 179 - DNA, 762 bp, Chlamydomonas reinhardtii
atgctgcttttaggactcgttctggccctcgctggccatgtagcggctgcgccttcaagcgccatgatgggcactggccacaccgtgggctttggcgagctcaaggaagaatggcgtggtgaggttgtccacctgtcgtggtcgccgcgagccttcctgctgaagaatttcctttcggatgaggagtgcgactacatcgtcgagaaggctcgcccgaagatggtcaagtcttctgtggttgataacgagtcgggcaagagtgtggacagcgagatccgcaccagcaccggcacctggtttgctaagggcgaggactctgtcatctccaaaatagagaagcgcgtggcgcaggtgacgatgattcccctggagaaccatgaggggctgcaggttctgcactaccatgacggtcagaagtatgagccacactatgactacttccacgaccccgtcaacgccggccccgagcacggcggccagcgcgtggtcacgatgctcatgtacctgaccacggtggaggagggcggcgagacggtgctgcccaacgcggagcagaaggtgaccggcgacggctggtcggagtgcgccaagcgcggactggccgtgaagcccatcaagggcgatgcgctcatgttctactcgctgaagccggacggcagcaatgaccccgccagcctgcacggcagctgccccacgcttaagggtgacaagtggagcgccaccaagtggatccacgtggcccccatcggagggcgtcattga

SEQ ID NO: 180 - DNA, 1803 bp, Chlamydomonas reinhardtii
atgggcgcgaaccagagcactgaggaggtgctggacgccgtgaaccaggcggacgtcgataagcttgcgccgacgcctggccctagcaaggagggaggcgccaccaagctctacaagtacatcgtcacacccagcggcgagggcaactgggagctggcgagcgcaaacgccaagccacgtttctatgacgcgctggaagactcgaacgccagcggcaagaaggatttcttcctggagattgagcagggcgacgtcgacgtgcacgtagatgcggagctcaactacgttcttgacgtgaagcagcgccgcatcacctttcacgccaacggcaccatctacgcgctgcgcttcccgcacgacacggcctgccgcgccttcggcgagcagctcaacgacgcgctgttctacaaccagtacggagtggagaacgacgacgacagccgcgccaagctgtttgaggacaacgccggcacactgttcagcaagaacacggatcgcatgtttgagcccatggagacggacgacgcgggcgacgaggcgggcgcggaggcggccacgccggagacgatgacggagcgtcgcgccaaagacacggagaaggatgaggacgccatcaacggcatcatcatgggcgcaggcgagaacaatttcctcatgcggggccgccgctttgacgtgcttcgcaacctggagggcggcggcgtggaggacaagggcgtcagcttcagcctcacgcctctggccggcggcgccgccacgccctcgctcagcacgcgcaagacccgcggcacggcggcggcggcagaggccgacgcgctcggggcgggcttcacgccctccaaggtgctcctgacgcacggcgagcggcgcatgaacctgctgacgcccgacaaccggcatgtgctccaccacgccgacattgaggcgggcaagatcgtgagcacctttgctttccagaaggacaccgtggacatccccattgtggagatcgcgtcggactacaaggccgcgcagatggaggagcactcgcagttcctgggactggaccagaaccgcctgtgcaggtgggacatccgcgaccggcgcggtgtggtgcaggagatgcccactgcgctggactacgtgggcggcaaagactacagccgcggcaccaacttcacgtgcatggccaccagcggcgacggcttcgtggcggtgggcgccaaggacggccgcatccgcctctacaacagcaagacgctcacgcaggcacgtaccgtatgcgagagagtatggctgggagtggccaagacctccattcccggcctgggcgcgcccatcaccgccgtggacgtcacgtacgacggcaagtgggtgctggccaccaccgaccactacctgatgctggtcaagaccacctacgtggacgacaagggccgcaactccaacggcttcgagagccgcatgggcggccgcggcgcggtgccgcggctgctgcggctcaagcccgaggacggcctccgcacgaagggcgccaagttcagcaagggcaagttcacctggatcacggagggcggccagtcggagcgctgggtggtggccagctgcggccgcttcagcgtcacttggaacttcgccaagatccggacctccaccaccgagtccattggctacggcggcctgcccaccagcatggactacgtgctgcgctccaaagaggaggaggtggtggacgtggcgttcgtgcaccagaagtacatgcgcgacgtggagcaggcggccatggtggtggccacgccgcacagcctgttcaatctggcgtaa

SEQ ID NO: 181 - DNA, 1041 bp, Chlamydomonas reinhardtii
atgagcatcatttacgcactcacgctggccctcaacggcgcgggccccaagacgtccacgcactcggagctgctggcagccattgccggcggcgccgagaacgccgccaacttgggtgagggcgacctgaactcggagctgggccgcaccatgacgctgctgaacggagccggcgccggcgcggccgagggctccgcctcccgcatggtgctcgccaacagcgtgtggacgcaccgcggcaccacgctgcgtaaggagtacgtggacgccatgcagtcgctgttcgacgccactgcgcgcgaggcggtgaacggcgccaaggacgtgaacgcctgggtggagggcgtgaccaagggcatgatcaaggacctggtacaaaccgaccagtgggacgccatcctggccaacgccatttacttcaaggggttctggacgcacgccttcaagaaggaggacacctttcctggcgagttcaccacgggcgccaaggccaccaaggaggttcccttcatgtgcaagaacttcgaggcgcaggaccgcattaccgccgtgcgcaaggagggtctgtacgacgcagtggcgctgccgtacaagggcgacgccttcagcgccatcgcgctgctgccggcggtgggcgtggccatggaggcggcgctcaaggactggggctcggggccgcaggagctgcgcccggtgggcaagtgctttgtcaagctgcccaagttcaaggtagagagccagctcagccttaagaccgtgctgcacaagctcggcgtcaagcaggcattcggaggtagcgccgacttcagccgcctcagcgacaccaagatgtttgtcagcgacgtcgttcacaaggccgtggtggaggtggacgaggagggcacggtggcggccgccgccaccgccgtcatgatgctgcgctgtgcgctgccgatgcccacgcccgagttcattttcaaccgccccttcgccttcatcatcatgcacacccccaccggcctgcccgcgttcgtgggcaccgtgaacgaccccagccagtga

SEQ ID NO: 182 - DNA, 1818 bp, Chlamydomonas reinhardtii
atgaggctcctagttgcctgtgctctattggcactactgcagctcagcgctgcagtgcgcctgcccgcggcgatagagcaggctgtggggaggcagctcctgagcgagaaggaccatagctaccagcctgatgacaaggtgccgctgtgggctagcaaggttggacccttcaccaaccccagcgagacatacgagtattacagccttccttactgccagcctaaggatggcgtgaagcacaagctgctgggcatgggcgaggtggtcgacgcaaaccgcatggccagcaccccctaccagctgcagttccgcaagaaccgccagcgcgaggcggtctgcgagcagcttctggatcaggagaagcttgcaaaattccgcaaggcggtcgaggaggactggtactttcaaatgtactatgacgacctgcctgtgtggggtttcatcggcaagatggagaagctgttcaagccgggcggtgttaccgagtacaagtattacctcttcactcacatcgactttgacatcaagtacaacgacgacagcgtgattgagattaatgtctccacagacccccaggaggccgtggatatctcggaggagattacggacatcgtgaaggcgaagttcacgtactcggtgaagtggacccccacgctaaccaagtttgagcaccgcctggatcgctacgagcgctttcccctcaaccccgtgcacctggagattcactggttctccatcatcaactcgtgcgttaccgtgctgctgctgacgggtttcctggcgactatcctgatgcgcgtgctgaaggcggacttcattaagtacaacaaggacgatccggccatggaagaggaggagtcgggctggaagtacgtgcacggcgacgtgttccgcttccctccctacaagaacctgttctgtgcctttgttggcacgggcacccagctcttctatctggcgctgtttgtgttcgtgctggcgctggtgggcgtgttctacccgtacaaccgcggcgctctgtactcggccctcattgcgctttacgcgctcacggccggtattgccggcttcgtggcgtcgtcctactacaagcaaatggagggcgagctgtgggttcgcaacatcctgctcacttgcttcgtgtactgcggccccttcctgctcatgttctccttcctgaacaccgtggccatcgtgtaccggtccaccgcggcgctgcctttcggcaccatcgtcatcatgatcctcatctggactctggtgaccatcccgctgaccgtgttcggtggcattgccggcaagaacaaccgcgctgagttcttcgcgccctgccgcaccaacaagtacccccgcgagatcccgcagctgccctggtaccgcaccacggtgccgcagatggtcatggccggcttcctgcccttctccgccatctacgtggagctctactacatcttcgccagcgtgtggggccacaaggtgtacatcatctggtccatcctggccattgtgtacatcatcctcatcgtcgtcactgccttcatcaccattgcgctgacctacttccagctggcggtggaggaccaccagtggtggtggcgctcgttcctgtgcggcggctccacgggcatcttcgtgtacggctactgcttctactactactacgcccgctcggacatgagcggcttcatgcagacgacgttcttctttggctatatggccatggtctgcttcggcttcttcctgatgctgggcactgtgggctggcgcgcgtcgctgatgttcgtgcgccacatctaccgcgccatcaagtgcgagtaa

SEQ ID NO: 183 - DNA, 417 bp, Chlamydomonas reinhardtii
atggaggttatcaccgctgtcaaagcagtcaaagctgctgctgcctctcgcggcgtgaagggcgtggagttagggcagctcatggcctgcctggcctcgatacctgctgaggagtaccgcgccttcattcttccaatagccgatgaccccgaggcggtctttgcgtacgtgcaactccgttacaaggctcaagcggcgccggctgtcggagctcgcgcgcccactgcgcagcagccgtacgccgacatggcgatgctgaaggacgcgctggcggagcagatgcggccgctgatgtccaaattgcaggaggtgctggctgacaacgcggcgcggcatcaccaccccaactgggccgacgttcgacgggagtgggctatgagcacggcggcagtgcccaagcagaagaaggtgttgtga

SEQ ID NO: 184 - DNA, 2187 bp, Chlamydomonas reinhardtii
atgggctgtgtcggttcgaaggaggatgctgcggatgttgcaaaggcccctcccagggccgaagccggtaatggcaatggacatgtagatgctgtaaaagctcaagcagccgcggcacagccggcccctgctgccgcgccagccccagccctgctggtcgaagcccctccaccggccccgcctgcagctcaagccgctcccgcagtgccaacgccccaacccttgtacaacgggccagatcaagggttgcctgcaccgcggcaagcacctccaccggccccgcaaggtgctgcgcctcctcctcatcatggaccaccaaggcgggagcgttcagagttaaagaagcggcaggggacggaatatgaggaggattcggactgggaccagtgctccacagcaaacttcaacgttgacgaggatgcgcaggccaaagattgcgaggtgccagcggtcggggcaagcgtcatggagaaggcgctgcacaattcgctatttgctcaggagaagcacgtgcccgggccggacaacgtgtacaaggagacgacgacgctgcgcatagacaaagtgaaagggtgcatgtttgtgaaccagtacctggtggtccgtttccttggtcgcggcgcgtgcggcaaggtgttcctgtgcctgaacacgtacgacctgcggctgtacgcgatgaaggcggtgcgcaaggtggacctggagagctcgcagccgccgcagcagggcgccaaaaagcgcaaccccatggaggacctgaagcgcgaaatcatgatcatgaagaagatgaagcacaccaacatcgtgacgctgagcgaggtgattgacgaccccgccggctccaagctgctgctggtgatggagtacatggagggcgggccggtgctgacgcgcgaggcgctggagaagcgggagcggctgccggagagcctggcgctgcagtacttccgggacatgatcaaggctctggactacctacacggcaacaaggtggtgcacggcgacctgaagccggagaacgtgctcatggccgccagcggggaggtgaagttgtccgacttcggctgctccaaggtgttcgccaccggcaacgagtacctggagcgctgcaacggcacacccgccttcctggcaccggagatgatgaagcccaacacgcgctaccgcggccggcccacggacgtgtacgcgctgggcgcctgcctgtacacgctgctgttcgggcggatccccttctccgcgcccaacctgtacaagctgttccaggtggtgcagaacgagccggtcaagtacccgccggacgtgcccatcaccgaggagctgaaggacctgctggcgcgcatgctcaccaagaaccctcgcgagcgcatcggcatgtcggagctgatgcgccacccctggctcaccatgaacaaccgcttcccgctcaagccctaccgcgagctgcgcgagggcgagagccaggagatgcacaacggcgtgatgggcggcctgacgtttgcggaggccaaccccaagcccgacttcctcacgggcctggccaacgtgagccgccacgagcgcgtgttccaggagggcgacatcatcatgcgccagggagaccagggcacctacctgttgtacgtggtcagcggcaccgtggacatcctggtcaagtgggtcaccatgccgcgccgcaccaacagcgcgcaggtggcgcaggggcagcagggcgtgccgggcgccaagcccgccgccaagccgggcgcgggcgtggacgagatgatggaggacagcgacaccatgtcgcccattgtggacgaggagagccgccagcaccgcgtcaacctcatgcgcgccagccagaaggcgggagagttcgtgcgctcgctgcaggccaatgcgggcaccacgcgagacctgctcattgcccagcgcggccccggcgagctggtgggcgagatggcgctgttcagcaagagcctgctgcgcaccgccaccgtccgctgcgccaccaaggtggtcacgcgcgtcatcacgcacgagcagctggtggagtacgtgatggccaacccgctggccaagcaccaggtgcgcgaggtgatcctgaagaaggagagcgagatcactatggtggaggcgctggtgaagctcaccaacgtgcaggacgtgatcacggcctcgctggagcaggcgccgcagttttaa

SEQ ID NO: 185 - DNA, 600 bp, Chlamydomonas reinhardtii
atgggtggcgagaagctgcttgaccagatcttcaacctaaagttcaccgccaagcagcttgcacgctcggcagtgaaatgcgagaaagaggagaaggcagagaagttgaaggtgaagaaggccatcgagaagggcaacatggagggcgccaagatctacgcccagaacgccatccgcaagaagaacgagcagctcaactacatgaagctggccagccggctggacgccacagtcagcaggctggagacgcaggccaagatgcagatggtccagaagaacatggcgggtatagtcaagagcctggagaaggccatggcctcaaacaacctggagaccatcgcaaacaccatgacgcagtttgagaagcagtttgagaacctggacctgcagacgcaggtggtggacgacgtgatgggcgcgcaggcctcgctgtccacacccgaggacgaggtgtcggcgctggtggcgcaggtggctgaggagcacggcctggagctggcggtgggcatgccccacgccgccgccggcaccgcccgccccgccgccgccaaggccgaggacgacctcaccgcgcgcctggcggagctgcgcggccggtag

SEQ ID NO: 186 - DNA, 903 bp, Chlamydomonas reinhardtii
atgccgggcgagggagcagctggtgcagcgggcgggggctctgggcgtgcagcagaagtccggctctacgtcgatttcatgagtcagccctctcggtgtgtcgttatcttcagcagggtaaacggcctgccagtggaggtccgacccatcttcatacacaagggcgagacacgctcccctgcctacttggcgctgaacccgctgggcaaggtgccgctgctggaagacacggccgcagctgcctccagctcctccgggcccggacccggacccgccgcagccgcgggcggagctggcggcagctgcgtcctgcgcctgcccgagagcgccgccatcatgagctacctcgctgacaggttcccgggccgtgtggcggagcactggttcccgcggtcggacctggcgcaccgggcccgggtggaggcggcgctgcactggtaccagggcaatattcgtgccggcgccgccaagctgtcattccacaaggtgattgccaagcggctgggtgtgcccagtgacgagcgagtggcgttggacgcactcaagacactgcagctggccctgtcggcgcttcaagacgtgtggttgggcggcggtgtcaggcgcttcatgaccggcgagctgccgtgcgcggccgacctgctggcgtgctgcgagctggagcagctgcgcatgctgcgtgcggttgagcacggcacggacatggaggccctgatggcgccctacccgcaggtgcttgcgtggcagcagcgcgtgcgcgatgccacctcgccgcactacgcccaagtgcaccgcgtgctcatggcggcggtggcgcagaaggcggcgccggcggggtcgggggcggtggcgggggcgggggcgggtggggcgggcggcggcgcggcgcagagcaagctgtga

SEQ ID NO: 187 - DNA, 2328 bp, Chlamydomonas reinhardtii
atgtcggcatttgaggagctgggcgtcatgccggagctggcaaaggcggtagaggacctggggtggatgctgccctcgccggttcaggccgaggccattcccctcatcctgggcggcggcgacgtcatggcggcggcggagaccggcagcggcaagacaggcgccttcgccattcccatgctccaaatcgtgcacgagactctgcgccagcgtgcgcgcagcggctccgccgccagcaccagcggccgcggcgcagccggggccgcagccgcagccgccagccccgcagccgtgccgtgtgtgctgagtagcgaggaccgggagctgcacgtggcggtgtcgccggacgggctgtcggcacagagccgctcggagaaggcgtggggcggcgtgcgcggcagcgtgggtgtgttcgccagctgcggcggcaaggtgtactatgaggtgacggtgactgacgaggggttgtgtcgagtgggctggagctgccccaccgctgcgttggagctggggacagacaggctgggctggggctttggcggcaccggcaagaagagccacaaccgccagttcgacagctacggcgagccgttcgccctgaacgacgtggtgggctgcctgctggactgcggcgaggccggcggcagtgtggccttcaccaagaacggccggccgctgggcgaggcgttcaagctgccagacaacctgcgcaaccaggttctgcaccccgccataacgctcaagaacgccgaggtcgcgctcaactttggcgccacgccgcttgccttcccgccgccgcccggctacatcccgctcgctcaggcgccagccgcctgggtggcggcgggtggcggcgcagccgccgccagcgcaggtggcggcggaaacggccgcggtgagaaggaccttgggcgcaagcctgtgtgccttatcttggagcctgccaaggacttggcggagcagacagccaactgcttcaacgactacggcaaacacctgaaggcgccggaagtgaagacggggctgttcgtgggcggcatggatgcagcgccgcagattcggatgctgcgtgagggagtggatgttgtggtgggcacacccggccgcgtgatcgacttcgtggagagcggcaagatccctctagaccagatccgctttttcgtgctggacgaggcggaccggctcatcgcggacaacccggacgtgatcaccaagctctacggccgcctgcccaagcagggcaccggcattcacaggctgcaggtgctcctgttcagcgccacgctgcactcgcccgaggtgaaggacatggctggccgcatctgcatcaaccccatcctggtcgacctcaagggccgcgacgcagtgccggagaccgtcgaccatgtgctggtgcgggtggatccgcgcgaggacaggagctggctgcagagcaatcccgaggtgttcacggacagctgccacgcactggaccgggtgggccccaacgccgcggccagccccgagtgcctgagcgagggcgtcaagcgcctcaagcagcgcctgctgcagcgcatcatagacaccatgaagatggagcagtgcctgatcttctgccgcaccaaccacgactgcgaccagctcgagcgcttcctcaacacgctgggcggggcaggcggcggggcaggcggccgcggcttccgtggcaagcgcgagagcggcaaggagaacccctacagctgctgcgtgctggcgggcgcacgcagcatggacgagcggcgcgccgcgctgtccgcgttcaaggacggggacgtgcgcttcctcatcgccactgacgtggccgcgcgcggcattgacatccgcgagctgccctacgtcatcaacatgaccctgcccgacaaaagcgaggactacatacacaggattgggcgcgtgggccgcgccgacaccatgggtctggccatcagcctggtggccgaggtgccggagaaggtgtggttctgcaccgtcaagggcatgaaaccctggctggcgcccgacagcagcaacacgcgcaccacggacaagggcgggcacacaatctggtacaacgagcgcgagttgctgggcgccattgaggggcggctgggccggcccatcccgcccatgtcggacgacctcacgctgccgccggagctggcggagcggctcagcgcggcgggggacaagtacggccagcagcgcggtggcggagtcagcaaggaggtgacggagcacctggcggcgatagcgtccaacgtggcgcagctggctgggctggagtggcaggtgcaaaccagctacctcagcctcaaacggaaatggggctag

SEQ ID NO: 188 - DNA, 780 bp, Chlamydomonas reinhardtii
atgctctcctgcagtgctctgtctcgcgcgggccttccacgcgcttcacggcaacccctcgttcgccgctctgacctgctgctggcaaggcagaacgaggcatggatatctgggcaaggccttggatggtgcagtcgcgttcgcgccgtcgagacactcgctgcaggcccagccggcgaggcgatcgccgagcttatttgggagcttccggcaggcttggccaagcgtgttttcattgctttttgggatatcaaggagcagctggcggccaagtccgaccaactggcggccaagtccgaccagctggcgacaaaaactgaggagctgtacaagatcaaggtggagctcacgcgcgcgctccacgctgcaggcgtcgtgaacgcccgcacgttcctggagtacgtggtgaagcagtgggagcacgagctgttcggctctgtggggaaggtgaaccgcctgaaggtcatcaaggcggggctccgcaagcgcccggagctggtgaagtgcctgcagcggaacgtgcccacctgggtgcgcgccggcatggacgaggagcggatcgtggaaaatatggccaagaacctggaggccatcatgctggactccagcaacaatgtgcacacgttccaccccgcgattgggctgactctgctcaaggcggcgcacagcgagcccatggtggctgcgctggtgtgcgttgcagacaacatgggagtgctggtcaaagtcattaaaatgaacgcgatgaacgacaacaatgacaacaacatctctgcgtga

SEQ ID NO: 189 - DNA, 2865 bp, Chlamydomonas reinhardtii
atgacgttggacctgctccttgcagacattgccgacggttcaatcttgacctcggggggcgacagcctggtctgctttgagaaaaccggtcagcggcgctggctgttccggttcaaccgcaagaccgaggtagtggccgacaatcagaccttcacctactcggcacgccaggatggtgccagcccctttatcgcggtatcgagcaccggccttgtttacctggccgccgccgacgcagttctgtatgcgctggacgtgcgcaccggcgacctcgtgtggcactggcgcgacagcccctccacatttgagtccatcacgtacggcgacggccgtgtctacgtgtccacaactgatttcaagacatatgccctggacgtggtaacaggggaggttttgtgggggacgcagttccggcgtgtgtcctcctggaccaccggctggttcaagggcgtgtttgtgcgcccagacgtggacgggcgcgtgtggggcgtggatgctgaaacgggcgacctcatttggatgttcaacatgggtgctgagattcaataccggtgggacccggaactgcacttccatccctcgggcattggattcatgatggctcggccctcccagatctgggcatacaacgtgacttcgggtgacgtcctttggaagatgaatgcccgtgagggatacatgagccctgacaatgatggcgacaatcggcagacgttcgaggtgtggggagacctggtgatcgctcaagatgagggcgccgttgaaaccaaccccaacaagtacggcatccttcaggctctggacgtgttcactggcgtgcgtgtgtggatccgcgacgacgtctacccgggcaagtacggcatggtggtcaccgaggggctgctggtctacaccacctacataccggatatgtctaccctggacgtgtcttcttcgctcctgatcagcgccatgggacccgaccaccaagacgtctggaactggcagcgcgatggcgcgatacccgccggccagatccaggcgctggacgggctcgtgttcgcgctgcaaggcgagatcgccaacaccaccttcaatggcttgggctcgtccacggtgctggtggcgctgcctgccacgcccagcgtcatttgcccgcccgatgtcaagtccccgccaatcactgtgaacaacaaccagcaagggaccaacgctgtaatagctccgccgccgccgccgttcgtgagcggcaagcccttctgctggactcattcattctcctacaagcctctgggcagccctacctctgacggcgtgcgggcgtacggccaggacaacgcggggttggtcattgcagtgtacctggacacgggggctattgcctggaaggccacttgcgggcccgatagcaattcgttatactacccatccaacgtggttgtggtggacggggtggtttacctgggctgctccaatctggacgtgcaagcgcgggacgcggccaccggacacttgctgtggcggcgcccatttcagctgacgcccgaccgtgcggcgtacaggggcgggatcatagggaaccccgccgtggcgaacggcaagatagtcataagtaaacccgacggctttctccaagcgctcaacatcacgaacggtgtcgaggtgtttgccaaaccactggagcccaagtgggccatggaacccgggcgtctcaacttccgacacgacaacaccctggtctacgccacctggtggccggacgcgcagcttcaggccaccacgatcggccgcgacggtggagaccttgcatggaactaccccatctcggacagcaccggggtctactcggtgctggtcgtgtcgggtgaggacctgggcctgccccatgacgcgctcttctacaacgacaacgagggcctcgtcaccgccctggctctgggcagcgatgggcctacagaagtcatgtggacggtggacttgaccgacgcgaggttgtggcccggggtggagaacctgctcacacctggccagtccgactgggcgcagattacctactctaaccagacgctgtacgtccccacgacccagggaatgtttgttgtcggggccacaaacggtgaggctctgtggtccgacctgcgctcccgcctcaacgccaacattcacgtgatcgagcggccgggcgggccccaagtcatctatggcaggtacctgtctaactttgagtccaacacgcctcagtgccggccccccaagccatccggccttgtcacaaagatctctgtgcgcggttccgtgcccgctgatggcggcgaggagccctcaacgcccacagacgcgccagcgcctgacagtcgcccggtgcctgtgactgcctccccacctccatcggttactcccgcccccgccccttccccgtcgccctctcctccaccatctccctccccggcgcccgtgcgctcgccgtctcgctcctcctcgcctccgccaccaccagtgtgcccgccctgcccagccattaactgctccgcgcccgccaagaggccctcgtcgcccgccgcggtcgcagtggcactgggtctgtctggcctgccgtacaacattgtgaaagccgactccaagctccgtgaccgggttgcgggggctgtggagaagctggtcagcggcaaggtgactgggttcgtgcgtgtgcgagtgctgggtgtggagagcaccgcgggcggcacggcggctgtgctgcgcctgagcctgcagcgcagcggcggtgcgtctgctaccgctgtggcgtctgcgattgaggacgcggctctgaatggcaagctacaggaggtggtgcttgcggccaaggtgccggccaaggtgcgcagcgtggtgctgaaggtgtga

SEQ ID NO: 190 - DNA, 612 bp, Chlamydomonas reinhardtii
atggcgctgggaggtgtgctgtataggcaagctgccactggctccggctcaggattcaaagtgcatggccaggctgtctccctgaactcccccggcacatctccgctactgccgctgctagtgctcggcagcacgggccttgtccaggtgtcggcggcctggacggggctgggggcctgccactggcacctgccctggctgctcaatgtccagctggggctcctggcgctactactggccagccagatgtgcatcacggccgcagtggtgtcggcgtctgaagccaaagccggtattggccgggtggcggggctgccacacgcgccatccagtggacgggaggtcttgtttgacgcgctgaggtcgcactggggccccggcattgcggtcgtggcagtggaagtgacaacattgctcgtcgcgtgtttgctacacgccatgtacatacgggcagacgaagccgcggaagaagcggaagagctaggagccacccgccagggagatgcatcagcgccgttgcttactcctaggcgcaatgaacatatggcgaccagcggacaacggacgggcatcgcatcacagcctacccgacatgcgagccaacgggtgtga

SEQ ID NO: 191 - DNA, 603 bp, Chlamydomonas reinhardtii
atggccgacagctcggcgcccagctccttcacaattctagcaacggggcaactcgagtgcgctgagatccccgagtgcaccaacgcgtacctgaagttccaatttgttgccggcgaggactggcaattactggatgggctagaggagggcatcacgcaggccgcacgtgtgccagaaggtcgcgacggcgtactggtctggaacttccccatcgacatcacatacaagaccacgaacgcgttcgggtggccgcagctggtggtggcggtgtatggcctggactcgttcgggcgtgacgtcatcaagggctacggatgcatacacctacccatggcggccggccggtacacgctcaagctgcggctgttccggccgcgctcggcgtcacttctgcagtcgttcacgtcgtggctcacgggcatgcccgccgagttctccgaccccaagttccccagctacggcgagggccgggaagtcacgcgtgtgcagtcaggtggccacgtcaaggtgcaactcaacctcatgaccaaggacatggacatgttcggctacgtggacggcagcgggagagaccccgccgtgagcgccatcacgcaaatgtga

SEQ ID NO: 192 - DNA, 6294 bp, Chlamydomonas reinhardtii
atgaatatcagttgctactcgtccattgtcaaggagtcagcgcgctctctggggctggggctggggctggggctgcccggcgccccggcccagcagcagcaccaccaccccagtggcgttcccggcagcggtgcgcacggcgctcccagcctgctgcccacctccgtggtggactcggccgcctgcgccgtgacggtcgtgtcctggtgcagcgctagcggccgctcagccatcatgtaccagaacgcccggtccgtggggctgtacggcagcctggccagccccgtactgcgcacacgtggcctgggcgagctgttgctgaggcggctgctggccagctccggcggcggctgcagggccggagctggcggtggcggcggcggcggcggcggctgcaggacgggcacggcggatgccgctaccagtgcggctgctggcgctgccttggggaccgcgcccagcaccaccacgtatgaccggagcaccgcaggcgatgcctcggtcggtggtggcggcggcggcggcaggcacacgggcggcggcccggtgatggtgatggcgtcaaccgccgcgggcggccccgttggctggggcgcggacgtgtggggctcgggcgacgcagaggctggggcggcgctgctgcagctgctgctggcggtttcggcagggcaggagtacgagtgcctggtccaggtggagccggaggcgctaggcacgcagctggcggcagcagcggccggcctcaccggcgccgcctcgccggcacccgcgccctttctttcgggggccggccccaacatggccagtgccgcgggcgccctggccagcggcagcagcggctcggctgcagcggggtcgggagcggcagcggcaacaggcgcaactgcgctggccctggccctgcgctcacgtccgcatggcggctcgcgctgcggcgcatcagcggcggtggacgcggcggcagcggcgctagcggcagcgcctgtgtcgtgggcgggagaagctgcgcccggggcagatggtgatggccgcggggaggcggagaggtatcccgagctcgacactatagacgcggcgcttctggaggcgttgttgggcactccagcacccgcgcctgcgacaggagcgcgcgcgggcggcaggaatgccgctgacgcggctgccaccggcaccggaatgagcgcagctgatcagcatgatcacccgcaccaacagccgtaccgccgtcatcagcagggccaggggcagcccatcagcgcttccggccgccgcgctttcacccacgacgtgcgccgcccgcgcaatgacccgctgtctgacgagtcaggggccttcgcgtcggcagctggggcagagcattcagaagcgtcggctattctcgactccagccccttcatcgcagtgccgacacccgcgcagacgccccggcctcatgctccaacagccggcgaggtggtgacggcggcgtgcgcgcctgccgcgcccaccgctgcggcacatgacggtggcggaggcggcgcgggagcgcatgcagcgctgcttggcaacttcgctgctccccaaacctctgccgctgatgatgccagtaccgccaccgccgccgccgcggcggcagcagcagcagcagaggcagctgctgtggagcagtggacggtgtgcgcccgcggcggcggaggcggcggaggcgaggggttcggctggcgccgcagccgcacgtccctgccggcgacgccgcgcgcccaccccgctgtagcggcgcagctggtgggctcgggcgtctcgctccacacagcccaggccgcaatagcggaggccggcttgcttccgtggcgctcgcagtacactccatcagcgggcgtaggccctctggaggcgcaccctatcgcggcatcagcggcagtgaccaccgcgctcaggccccccaccactacgcccaaccccacgcagcccagccagtccctgcccgcgagccagtccacacgcggcctcatcaccatgtcgccttacacaaccggacccgctggaatgagtcccgctgacctgtcggggccgtttgcgatgccgccgccgccgctggtgtcgccggcggcgtcgcggccgctgccgccgctcgggattgcctcgaccgtgtcaggcagcggcggcggcggcgcctcataccactctggactgctggcgtgcctgacgccgctgcaccgcggcggctcgcggccgcaaacactcgtcatgtctcagctggtgcaggccggtgcggcggcggcggcgcagcggaggcacagcatcggcggcgccgcgctgcgtcgcagcctcagcgccagcggccgccttgatgcggagggcgctgcagcgatggcggcagcggtcgccgctggcgcacaggcggctggcggaattgggatgtctggcgcaggcatgcgtgcaggggcgcaggtggggaccaccgcggtggccttgtgtgcgggtgcgcagcgcctttccttcaaccctccgcggcaccagtcagctatgggctactcggcatcgcaagggccagccgccaccggcacagccgcggccgtcaaacgggctatcttgtacggcggtggcactggcgctgccggcacagcagccgctgcggccgctgctatcaccgctgccaggtccgccgctggcttctccgacctctggccggcggctgcaggtcccagcagtgacgggagcctgtcctcagcccccatgagctctcagcctccggccctgctgaacgccgtgggttcctttggccgctcgcgactgggccccgggcccgccggcagcggccgcagcttcttgggcagtcaccccggcacgttcatgcccgccgccggccgatccaccagcagcggtggcgtgacgccggcttacgccgccgcggcggcggcggccgccgccgcctcctattctgtggaccaggcaggtacggtgggcccggcactgtcgccgctcttcaccattacggatgaggcggttgtcgagtacggctcagatgacgtacggcttgacggcggctcgacacgcgccgccacactcgacggcaacctccacggcaccggcaacgcgggcagtcatgcgccgagcgccgtcagcgcaagcacccgacgcagcgtcggcagcttcgcgctgctgtcggagcaccgtggcgctggcgggggcagcggcacagcaggcagttgcgcggtgctgtcgccgcctgcggtggggcggcgggcccgcggcggcggcggcggaggccgcggcagagctgcgttgctgcattcctcagcggaggagatggagggactggtgctggtgggcggtgtggagggtgacgagggtgacgatgacgaagacgcggacgcggacggtactcgtcgcgccaacagccgaaacgcacagcggccgcagcaggcacaacagggcgcggcggcggctgcggcgggcagctgcggccggcatggcagcaacaccggcagcggcgcgcttcgggacggtgcgaacggctctgggggcagctcggaaccggcggaggccaccctggcagggagcgctggcgagttcgaggagccggtcacgccgcggtctgcctacgatgcctctgctggcgccatggagtcggcgtcggtgcctatcacgcccatcccgcattccggcctgcggccccgcgctggcccttccgaggctccccagcagctgactgccgccgccgccgcctcggcttggcccccaggcgacgccgcggaggcctcgggagctgtgcaagccgaagacgctgctggcgacgggtgtgtgcgcccgaacctgctgttcccatggaccctccctccccaaccctccgacactgctacctccgcaaatgccgctgtcgccagtcccgcagccgccgtccccaaaccggtaaacacagtcgcagccgccgcggctgcggccgccttgaggggcaacagcggcgaggcgtcgctgggcgtgtcgccggcggcgccgcccgcccttgcgctggacaccctcctcagcgaggattcgctgggggcgctggggcgctttgcaaccggtgtgctttcccctcgggagctgccgtcgctgcagcacacaccggcggaggcgctggagccgccacagcagcagccgggtgcgtcgccatccatgcctgcgcctgcggcggcggcagtggcgaggatgggcagagccacgagtgacggccagcaggtgttgcagcaggtgccgagcggcggcgtgcctcgcactagccgcaccagcaccgccgcctccatcatgcgcgggcggccgtcgctgcagctgagtagctcctaccaccagcatggctcccccagcattgccttgcagacaagatctacgctgcctccatgccaacagcctgacccgcagcaggctttggaccagcagcagcagcagcaacagcagctggtgcagctgcagtccacgccactgcacaagctgggaggcattgctggcagtgctggcagcggcatcggtcgtgtgcgtggcgcggggctgaagcgcaacacaacacgcgaccgagtgcaaatgctcttcaccaacatccgacatcaggagcagcagctgctgcaaggggcaccgggccacggccccgcgcacgtgctctctccgcttggcatttccgcggcgttttcgtcggtcgtggcggacgcaacagttgggactgccgatggccgcagcagcgccgcacagcagccctggtcccccggccgcggcagccacgcggccacgagcatgggcattattgcaggcgagggccgcgtcacgtccttcaggcacagctgcggcggcatgatggggtacctacaagccggcggcctgccgcagcagcttgctgttggtgccggcggcgttggcggtggctgccgtagcatgaccaggtcgggtgcgggcgtggagggtgccgtggcggaagccgcggccgcccaagcggccttgggagctgcgccggcggctgagttttcggtgcccggtgctgcggagctgatgctggcggccggcggcggcgcgggcggcgcaatggacgtgagcggcgcgctgcctaccgtacacagcatcaccagcaacggtagcggccggaagtggcacaccgcggggaccgcagcaagccttgctagtcccgaggggccggtcgcgaatgttgcaagcgtcgccagtgtggcccacgcgccgttcgcggccccgccagcagccggaacggctcggccgtcgttctcaaagcacgccgcggcccccgcagctgcggcgcccgccgcgccgcgccggcagcgctggcaccggatgcatgcggtgctgtgcgacaccgggcagcacgagcgcctgcaccgcacggcacctggccagcagcaggcgcccggcgacgaggcggcgcaagctgtggagcagcaagcggagaaggcggctggcgcgggcaccgtcatgttcgtcacgatcacgcagatcgacgtgacggagcaggtggaggcgcaggcgcagctggccaagctgttggagcaggagcacaaggtgctggagggcatctacccgcgccatgtgatcgagtactacagcgccggcggcggcaagctgattggctctggcgcggcggcctcgggccctcaaggcggcggtgccaacgtggagcgcatggcctcgctggccacgtggcacgagggcgtcaccatcctgtttgcggacattgtcggcttcacggccatgtgccaccatccgaccaccacgcctctgacggtcatggccttcctgaaccagctgtacagccgtttcgacgcgatgattgacatctacaaggtgtacaaggtggagaccattggtgactgctacatggtggcgggcgggctcgtcgcttacgatgacgacggctacaagtccgtcatctcgggtggcgaggacccgctgcatgccgtgcgcgtgatggagtttgcaaaggccatgatgcgtgccgcaagggatgtgcggatgccccataccggtgagccggtgcagatgcgcattggcctgcacagcggccccgtgaccagcggcgtcgtgggcgaccgcatgccccgcttctgcctgttcggcgacaccgtcaacaccgcgagccgcatggagtccacgtgccgcccaggcagcatccacgtctctgcgcccacccaggcgcggctgccgaacgagccgtggcgcgaccgcggcatgacggaggtgaagggcaaggggcagctgcagacatacgagtgggccggggacgtggatgcgccctatgacggcaaccagctgcagcgtgtgattggattgtatctgtaa

SEQ ID NO: 193 - DNA, 3129 bp, Chlamydomonas reinhardtii
atgacgattgaggttggcgactggctctccaagccctctaccggcgtgctaccgccttgtggcgtgttcgtcgagggcggtgagaagccgatcccggtgccgctcaagcggcgcgatgtctcagcgaccgtctacgccgctgcttccttttccgataccaaggagaccctgagctatgtgagcgacgtggagtgctcggcagtcttccgtttccccttgccgccgcgagcggccgtgtacaggttccgcgccgtgtttggagaccgcgaggtcgtgaccaaggtcaagccccgcgccgcggctcgtgaggaattcgacctggccgtgtcgcagggccactcggccgtgcacatgtcccagcacgaggcgggtgcgtccgtttttgaggtgtcgcttggcaacctggaggcgcacaccgaggtgacggtggagttcagctacctccggctgcttgacgcgttcggcggcacgctggagtggagccacaccgccacgtgggtgccgccgtacgtgggctcagcaggcgacgtggcaaccggcgtggacaaggtggcggcggcgctgcccacctttgcgcccaaggtgacctacgtcctctcctacgaggtcacggtgcgggcggaggcgggcacggtgcgtgccattgagtcgcccgagcctgtgaccgtggagcgcccagctgcggctgccgaggccgcggcaggtgctggtgcggaggaggtgtggcgcgtgcgtctgtcggagcaggtcgccgacccctccaaggacctctcgctggcgattgagctggatcccaaggccgcgcgccgcagcggcctgcgtgtgcagcgcacgcccgcctcccgcggcggcgagcagcgcactgttgcgctggccacgtttgtgccgccgctgcccagcccgcccgccgccggcgccgacggcaagcagcagctgcgcaaggagatctggtttgtggtggactgctcgggatccatggacggctctcccatcaaccaggcccgcgaggccgcgctgttcttcgttcgtgacctgcccgtggacagcggcgtgcgcttcaacatgaccgtgtttggatccagccacaactcgctgtacagcaactgcaagccgtacgacagcaagaccgagaaggaggcggttgcctggatccagagcaaggtgcacgccaacctgggcggcaccgagattctgggcaccatgcagcacatctacaacagccccatcgcggccggctacacgcgtgagatcatcttcctcaccgacggcggcatcagcggccacgaggagcaggccgtgtacgacctggtgaaccccaaggccaaggcccccgtgcccgccgcagcccgcacccacgtcctgagcctgggcatcggccacggcgtgcaccgctctctgctggacggcatgtcgactcgctccgacggtgcggtcgtgtacgtggtggacgatgaggcgattgcggccaagaccgcattcctcaagaaggctgccacagccgctggcgccgccctgcgcccgcggctggtggcgcgcaatgcgctggtgcggcccgcgccgcacgtgctgcctcagcgcgtgtttgccggcgagcccctgcacgtgctgatggaggtggttagctctgagcctgacgcggcgctggagctgaccgcggactgggccgagccggagtcagctgccggcgcggcgccgctgactctgtcgctgccgctgggccctgcgctggcgtctgcggaggagggcgaggcgcttcctgtgctgcacgccatggcctacatcggcagcctcatggccggcactagcccgctgcacgtgcggtctgacggcacgaccctggccgccccgccctctgctgacacggtcaaggaggcggtggtgcggctggcggtggccgagcacctggtcacgccgcacaccagcgccgtgggcgtgtcgctgcgccgcgaccccgctgcccccgaggccgctgccaacgtcgtggaggtgccgctgcagctaccacacggccgcaagctgtggggcaccgcctccggcgctgggcccatgccgccgcccatggctgtctgctttgccgcgccgcccatggcgcagcgtggaggcaggatggcatgcatgagcgcgtcggcgatggcgtgtgcgccgatgatggcgtgctcggcggcgccggcggcgccgccctgccccgtgccgcaaatggcgtcgccacagatgatgtggtgcggcactgcgccgggcggtggcggcggccgcggctctgcggctccggctgcgaccaaccaggcgtttgcgtctgcggatctgagcctacgtggcgagaagattgaggcgctgtccgacttgagctgcggcgtgcagcaggaggcccagtgcttcacgaagaaggcgctgaagaagaagtctgccgccgccagcctgggcgacgccgtcggcggcgccatgggctcgctctttggcggcctgttcggcagcggcagccgcggcgcctccgccgtgtgcgccaagccggcgcagcaggcgctgcagggccctggcagcgcaggcggcagctgtgtcgctgccgagttcgccgccccttgcggtgctgcggcgccggaggcggagcaggaggagtcgtgctgcgacgacggcgcggatgagatggaggccggcgactgcgacgctggctttagcgtgccggcgatgaaggagtcagtggcgcggcgctcgcgctcctgctccgcgtcgccgccggccgctgccgcggcgccggcggagcgccagctgcgtggctccgagctcctggctttcctgaacctcaagcgcaccacgcagggctactgggccgccggccccgagctggcggcggcgctgggcgtgccggttgtggacctgacatccgctgcgggtgctgccggcagcggcggcagcaccgcagcagtgctgcgccccgccggtctgaccgacgacgcctgggcgactgtggtcgtgctggctgtgctgcggcgctgcctggcggctcagcgggaggtgtgggcggacatggaggccaaggcgctggcatggctggcggcggcatggccggagggcggccgcagcgtgggaagcaccgtcatggctctggcaaaggcgctgacggtggaggcttga

SEQ ID NO: 194 - DNA, 744 bp, Chlamydomonas reinhardtii
atggcggaggctaactcgcgcgagctcgcgctttacagcgccaagattgctgagcagtctgagcgttaccaggacatggttgaggagatgaagaaggttgctgtgctggctaatgagcaggagctgtcggtggaggagcgcaacctgctctcggtctcctacaagaaccttgtgggctcccgccgcgctagctggcgcattctgcagagcattgagcagtcggagcaagctaagggcaacgagaagcgcgtgggcatgatcaagaggtaccgcgcggtggtggagggcgagctcgacaaaatctgccatgagatcctggacctgctcgacaagtacctggtgcccagcgcctctaccaccgaggccgctgtcttctacctgaagatgaaggccgattaccaccgctacctgtctgagtacaagacggacgaggccaaagcggcggccgcggagttgacgctggccgcctacaaggtcgcccaggagaaggccgacgagctgcccacgaccaaccccatcaggctgggtctggcgctcaacttctcggtcttctactacgaggtgatgaaccagcccgcgctggcctgctcgctggcgaagaaggccttcgatgaggctatctctgacctggactcgctcggcgaggattcctacaaggacagcgcgctcattatgcagctgctgcgggacaacctcaccctgtggacgtcagaaatgcaggacgacgacaagaatcgggcatga

SEQ ID NO: 195 - DNA, 1818 bp, Chlamydomonas reinhardtii
atgccttcggccgctaccaagaagaaggagctggagaagaagaagagcggcaagctttcgaagtcgcagagcacggcctcgatgccgcatgccgactccactgcctctctggcgtccaagggcggccccgtcgaggatgacgccttcagctcccgcaccgtgaccggcgtgctgagctcgcggcccaccgcacgcgacatcaagatcgacggcttcagcatgggcctcaacggctgcgagctgatccaggactgctccatcgagctgaccatcggccgccgctacggtctgattggccagaacggttccggcaagtccaacttcctcaagtgcatcgccaagcgcgaggtgcccatccccgaccacctggacatctaccacctggaccaggaggccgagccctcggagcgcaccgcactgcaggccgtcatcgaccacatccaggctgagctggagcggctgcacgccctggaggaggagattatgtccactaccggccccgaggacgagcgcctggaggccatctacgaccgcatcgacgagctggaccccgccacctttgagagccgcgccgccgagctgctgcacggcctgggcttcagccccgccttccagcagcgcctgaccaaggacctgtcgggtggctggcgtatgcgtgtggcgctggcccgcgccctgttcgctgcccccacgctgctgctgctggacgagcccaccaaccatctggacctggaggcgtgcgtgtggctggaggagtacctgaagaactacaacaagtgcctggtcgtcatctcgcactcgcaggacttcctgaacggcgtgtgcacgcacattatctggctcacccacaacaagctgacgtactacaccggtaactacgacacctttgtcaagacggtggctgagaacgaggtggtgcagatgaagaagtaccagaaggagcaggaggacatcaagcacattaaggagttcatcgccagctgcggtacctacgccaacctggtgaagcaggccaagtccaagcagaagatcctggacaagatggaggaggccggactcaccaagcccgtgcagcgcgagcgcaccttccagttctcgttccccgagtgctccaagctgcctcccccggtgctgccgttcatcaacgtgtcgttcgcttacagtggcaagcccgaggagtacctgtacaaggacctggagttcggcattgactgcgactcgcgtgtggcgctggtgggacccaacggcgcgggcaagtccacgctgctcaagctgatgaccggcgacctgacgccctcggtcggcaccgtgacgcgccacccccacctgtccatcggccgctaccaccagcactcggtggaccagctggacgaggagaagactgtgctggagttcttcaagtccatgtaccccaacacacccaccttcaagcgcgaggaggacgagtggcgtggctacgtgggccgcttcggcatcagcggccgcctgcagaccaccaagatcggcatgctgtcggagggccagaagtcgcgactggtgttcgccatgatgtgcatgaagaacaacaacctgctgctgctggacgagcccaccaaccatctggacattgaggccattgactcgctggccgacgccatcaagcgctacgacggaggaatggtgctggtcagtcacgacttccgcctcatcgaccaggtggccaaggagatctgggtgtgcgaggacaagaaggtgacgatgtggaagggcgacattcgcgactataaggcgctgctggccaagaagatgggcctcagcggcgtgcccggcaagaagtaa

SEQ ID NO: 196 - DNA, 3246 bp, Chlamydomonas reinhardtii
atgggcaatgagggcgaggttaaggtggcggtcaacgggacctctattgaggaggtcaactttgagaagattgatctgaaggaggcgctgtcaattctgaacacgacgcctcatggactatcctccgcggaggcagacaagcgccttgcggagtatgggccgaaccgcctgccggagagcaagcgcattccgctcctggtgttcctcggctacatgtggaaccctctttcgtgggctatggaggccgcggccattatcgctattgctctgctggattacgctgatttcgccctcatcgtgggcctgctgttcctcaacgccgtgatcagctacgtcgaggagtcgagtgcggacaatgcaatcaaggcgctggcgggagcactggcacccaagtgcaaagtcattcgagacggcacgctacaaaccatggaggcggtcaaccttgtccccggcgacgttgtggtcatgaagtttggtgacatcgtggccgctgacgtgaagctcttctccgacgacccgcagcatccgttcgattcacactctgaggaggtgcccatgcagattgaccaggccgccctgaccggtgagtcgctgcccgccaagaagcacaccggtgacgtcgccttctctggctctgccatcaaggctggcgagcgccacgccgtcgtgtacgccaccggcatcaacaccttcttcggcagggctgctgcgctgatcagcggcacgcacaacgtcgccaacctgcagatcatcatgaccaagatcggaggcgtgtgcctggtgaccatcggtgtctgggtggtgattgagctggccgtgcagttcggccactacggccacggctgcacttccggcgaggagggctgccccaccctgaccaacatgctggtgatcctggtcggtggtatccccattgccatgcccaccgtgctgtccgtcaccctggctctgggcgctgccaagctggccaaggagggcgccattgtggcccgcatgagcgctgtggaggagatggccggtatggacattctgtgctcggacaagaccggcacccttacgctgaacaaactgtcgatcgacatgaacaccatctacaagtgcgagcccggtatcaccaacgacgacgtggccaagtacggcgcgctgtcggccgacgttgccggcgaggagcccatcgacatggtgctcttcaacaactacgccaacgccaaggacctggccgcccgttacaagaagatcaagtgggtgcccttcaaccccaccgacaagttcaccgccatcacgctcatggaccaggagaccggccgcgtcttccgcctgctcaagggctcgccccaggtggttctgggcaaggcgtacaacaaggacactctggccgacaacgtgaacgccaagatggtggagttcgccaaccgcggcttccgctccctgggtgtggccatggccgagggcgatggcgctgacggcaagcacgagtggcacatgctggcgctgctgcccctgttcgacccgccccgccacgacaccaaggacaccatcgagtactgccacggccagggcattgaggtgaagatggtgactggcgaccacctgctgatcggcaaggagaccgccaagatgctgggcatgggcaccgtcatgtacccctcggaggtcctgatcaaggccaagaacggcgacaagggcgccctgggcgacttccgcgacgtgacccacatggtggagtcgtgcaacggctttgctgaggtgttccccgagcacaagtacgagatcgtggccatcctgcaggaggccgaccacgtcgtgggcatgaccggcgacggtgtgaacgacgcgcctgcgctgaagaaggccgatgtgggtatcgctgtggccggcgccactgatgccgcccgcggtgccgccgacatcgtgctgaccgaggcgggcctgtccgccatcaagaccgccgtgctgggcgcgcgcaagatcttccagcgcatgaccacctactccaagtacacggtggccatgaccttccgtatctgcttcacctttggcctgctgaccgtcatctacgactggtacttccccaccattctgattgtgatcatggccgtgttcaacgacggcgccatgattgcgctggccaaggaccgcgtggagcccagccgccagcccaacgcctggaacctgaagaacatcttcctgatgggcattgtgtacggcctgtacctcaccctgtccacctgggcgctgtaccagaccgcctgcaagaccagcttcttcgaggaccacttccccatcttctcgctggacgaccgccacatcaccctgcagaactggtgcaccggctacatcaccaaccagctgaacctcaacccgaccgccagcatctgcaccatgcccacctacctggcgcagttcgacagccaggcggcttgcattgaggagatgggcggcgagcagatcatcaaccagtgcatggccgagcagcgctacatccgcggcgccatgctgcgctcgctgatctacaaccacgtctccatctccggccaggcgctggtgctggtggtgcgcaaccagggcttctccctcatggagcgcgccggcagcctgacctacatcgccttcgtgctggcccagatcggctccaccgtcatctcggtcttcggcttcggcggctacgtgccccctcgccaccgcttcaccgactgccagttctgcagctactctgactacacccccgtcaagttcttccccagcaaggaggtgcccatggccggcaccgagtcggtgtacacggcctccgtgctgggctgcctgggctacgtgctggtggcctggatctggacgggcatctggtacgtgctgctggaccccatcaagtgggcgctgtgctggatgctcaacgaggacggcttccgcgacatggccaccatgaagcacgagcgccgccaggagctgggccgcacctcgcagcagaaggccgccgacgtgggcgtgaccggcatgaccgtgcccaccgcctccaacccgctgggccgcgcctcgatccagaagcccgtcaccatggtgctggaccgcgcctcggccgccctggtgcccgtgcaccgcaccagcgacggcctggtgcgcgtgtcggccgaccccgccaaggcccgcgacctggcgcgccgcagccgcctgaacgagggcatgcagcgcaccagcggcggcgcgcacgctgccggccacaccggccagaaggagatcacgcgcgcttaa

SEQ ID NO: 197 - DNA, 1563 bp, Chlamydomonas reinhardtii
atgaaggatgttgccaacaaggaccatatcagcagggtcgaggtgaccatgaaaaaccatatcagcaggttcgaggagaccatgaaggaccatatcagcagggtcgaggcgaccatggagggccatatcagcagggtcgaggagaccatgaagacgggctttgtggagcagcagaagttcttcgtgctgctggcgctcgcgtttccggtgctggttgcaatcttcctggccctgatatttggggctatcacgcagtttcccgtggaccccagcagcgtagtcatggctcagatcatgggcgctgtagcggcgctgatgcgggtgcagttcgtgagcggcacacacgccatcgcctcggcgctgctcccgcccgcctgcactctcgcctctccggcaaaacccccgctggcgccgaccgacgctgcgctgccaccgccgtcgcccgcacccgcacccgcggccctccaccccaccgacccgcgcaacaagaccgagcgcttccgcctggtgctgcaacagcccgccgccttcatgacgccggagcttcgggaccagctgcggcagcgcgtgctcgtcatcgtgcgcggctacctgtcctcgctgtaccgggcctgcctgggcgcctacctggaccaccaggccgccgccgcccaggcgctgggcatgcgagtgctggtcggcaacatctgctgctgcagcacctccgcccgcaacagcgcatcgctggcggcccagatcgccgcacacaccgccccacacgaccgagtcatcatcctggcacacagccacggcaccctggccgccctggacctgctgtgcaacccggcccacgccgccgtgtcgcaacgcgtggagtgcttcctcccccttaacggcgtgttcggcggcacgcccatggcagacctgtgcaccagctcgagcctggtgagtgcggtgctggaggcgacctggggccggctgctggcggtggtgggcggcggcgaggcgggcgtgctgcgcgacatgacggcggcggcgcgccgcgcatatcacgcgcaacacggcgatcgcatcgcggcggtgctgcggcgcgtggcggtggtggcgctggcgtcgcactaccgctggccccggtggccgccgccgcggctgctgcgggttgctgctgtggaggcggctgtgggtgtggccctgctgccgcagcgcatggtgatggacgcgatgggctgggcgcccaatgacggctgcgtgccgctggccagccagctgctgccgggcgcggcctacgtggtgtgtgagggcctgcaccacgtgcacaccgtggacgacctgggtgcgctggacctccgggcgttcacacacacgctgctggtgctggcgtcggaggcgcggctggcgctgatgaaggagcagggagaggaggtacaggggcaggcggagcgggagcgggaggagaaggaggcggagggtggaggtggaggcaaaggtggtggtggaggtggaggggcggcggcggtgcaccggcatgaggaggaagtggcgcggcgcctgctagcgcccggtggcgccggaggtggagattaa

SEQ ID NO: 198 - DNA, 5040 bp, Chlamydomonas reinhardtii
atgttcaaccgacggaaaagcgcggaggcgcggcggagcctggaagcccgcgcccggcactcggaggaatgggtgtcggacccgcctgtggccagcggacaggatatggagatacctttcgggctgcggcatgattcggaaatcggggccggtattatgcaccaggccgtggaccgagcctcaagcagcgtgcagctgcgaggcacaacagatgccgccctgtcgctggcaatggagctgggcttcacgataggcaacgacgacgaggaggacgagcaagaggagccgggagagccggggactgagttgcaggggcaggttgaagatgtggaggatgtggaggaagggcagggggaggaggacgacggggatggggccgaagatggcgaaggcgaggaatggacgtacgacgacgcaggcctcgggcccttgcatcggcccatggaaggcgaagaggtgcgcactggtttgtaccgttcggcgctgttccagcaattgcagccaatgccgcagctcccgcagacagcatttataaccgggaacggcgaggcgagcgaggttggggcacggcatgacggcatcgactctgtcgttgcaccggacgtggagagcgagcttgctgagggcggcgtgcccagcgccgcggctggaccgcagcagtcggcatctgcccccgccctcgttgccgctgcagccgcggctgtagcagcaggcgggagcggcgccatacgcgcgagcgtgggccgcagcggggccagcaatggcgcggggcacggagacacaggcggcagctcagggcttgaggcagtcatcggttttgccgggggtcgaggcagcacagccccgggacctggcggcagcggcatggcaggggacttggagtggccggggacccgtggcggcaccggcagcggcacgggtatgggtggcaaggcgctggcgagcaacgtcgcgccgcagtcgtcacggcacagcctggtggtgcgaaccagtgccgcgcccatgttcccgcagcacacgcagcacccggtacaccaccaccacctgcaccaccagggcaaccactggtcgccgctcgggccgtcgccgcacgcttcgggcctgagcctggcggcctccgcgccgccgcacacccagcagcagcctgcgtcccccaccgtgcagcgcattgcgggccgtggccgaggccgtggcctgtcgtacgacggcgagaacggcccggcactttcgtcaccaccctcccagccttcaccagacgtgcggccagatgctctgcagcaacagcaacagcaacagcagcagcagcacccacagcctgcaccgcagcagattcagcgggctgtgttcctggacatcgttcaacgcaagccctgggtgctcctggtgcccgtactcatgtgctttttgatcacggggctgggcgtgtttggagtgctcttcgcctcggtccgcaatataagctcccagcagaactacgcgcgggaggccgtggcgtccgcaactgcaaacgccatttcgggccagctggaaatcgcaacttttgccgtgatgaccatgtctgcctacctcacgcaacagcccttttgcgccgacctcaaccgcaactttaacaacctgtcttcagtgattttagattgggacgagaagcatctcgtataccaggtccaggcgctgccggccgcggtgctcaactacatctacccgccggtcagcgacccagaactggagaaggtgctcattggtcgggacctgttggaggtgcccatgtaccgcgaggacacgctgtaccagatccgagcacgtgaccagcgcctgatgctggggccgtacgcgctgctggaggggttccagggcatgttcgtgacctaccccatcttcctgcccgcaccgaactccacctttgattggggctgcggcgtcgagccgcacgactgcccgccgggcgtgtgctggctcgcgaaggagggcctgaagctgtgggggctggcgacctcggtcgtgtcgctggacaacatgcaagccgatttccggtttgcgacgctgagctcgcagggctacttgtaccggctgcaccagctgccgcgcgcgcccaatcgcgccgcaaccatcgccgcgagcgacccgcttcccagcgacccagtcacggcaactgtggcgaagttcaacctggtgtgggtgctggaggtgtcccctgcggcaggctgggtgcccgagtggcgcgacccgtgcattgtcgcggtggtggtgggctctgtggcggtgtcgctgttggtgctgtggctgctggtgacgcgggagaaacacaacatgctgctgcaagccatgctgccggagaaggtcatctggcgcctgcagcgcggcgagcagacggtggtggaggagttcttggatcccgtcaccattctgttcagtgacattgtgtcgtacacggaggttgcctctcagctgactgcgctacaggtggtgcggctgctgaacgagctgtacacacagtttgacttgctgtgcgataagcacgaggtgtacaaggtggagacaataggagatgcgttcatggcggtcgcgggctgccccactcgcgaagagcccatagccgcggccgtccgaatggccaacatggcgcaggacatgattgccatggtggaggagttcacaacgcgcgtgggcgatgaggacatgaaagtcaagatccggatcggcctgcactcggggcctgtggtggcaggcgtgattgggcagcgcatgccgcgatactgcctgttcggcgatacggtcaacaccgccagccgcatggagaccaactcctcgcccatgtgcatccacatctccgcagccaccgcctcgcttctgaggctggcgggagcaaaggtggtcatgccgccgcgcaacatcaagcgcgccgccgccgaccgccccgttgcgccggtttcgccactgcgcatgggcctgccgtcggccggcggcctgccctccgccctgtcacttctgggcgcacttcccagcggcatacttcaaaacggcacaggccgggatagaacgccgagcgatgtcggcgtggcccacctgccgccgccctcgccgcccaacctgtcgctgctgctggagcaacacgaccaacagcagctgagcaatggcgacatgtggcacggcggcggcggcggcccggcgggtggtgccggtggcggcggaggcatgaacgctgccgcgcccacggcccatgcctcccgtcagagcctcatcaacttgagtgacacagcgttctcagctggaggcgcgggtgcggcgtcagctgccgcgggcgcgcagcagtcacacccgccagcagccggacccacccagaagcctcacatgcagcagcatccacatcccagtggcaccgccgctgctgtggccccgccgcctgcatcgcagctgtggggcggcggtgtgggccgagagcgcaacatgctcccgatgctggacaagccaatgacattgttcggccgtggccggaccatgatcaagggcaaaggtcacggcagctgccgcccgtccgatgccggcagcagcaccgacttcgtacggcgcgttaccaacacgacgaacggtggcggcctgacgccgccgccggctagcggggccggcggttacgctggaggttacggtgcatgcggtggctacagcggagccgctgctacggcaacggctgctaccatggtcgtgccccatggcacggatgatgcgggctctctgtcggcggcagcggatctgctgcagtcgggcatgcaggcggcggtgatatcggcagcgggggcgggggctcagcaccagcctggcctggcgggcacgacgcagtgccggtcgcctctgggccgcaagcgcagcgtcagcgtccactcctacacctctccgtccccaacacagcagcagcagcagcagcagcagcagcagcatgtgtcaaggcagcggctgccttcggcgcaggcgcccacgctggcaactggcggttcatcctctgggcaggccccgcccggcctttcctccggcacggcggcgtcggtgctggcggcagccatggcgctggggccgcacggacaacaccagcagcagctggcaccagcacccaccgcagaaacaggcctgctggcaatgacctcgagcgccgccagcttggaggacattgcctttccggtcgccttcgacccgcccattgcggatgcgcgcaacccacagcataccgggacgcgcgccagcaatttgctcacctctgcggctgaggccgctgcgttcaactcggccggtgcagctacctccgcagacccactgggtgcggccagtagccccgaccctcgcatggcccgccgcctgcttggcgctgccgtgtgtgacgcctgctcgagcggcgagtgcgagcttgcgattacgggtggctccgtgtcgaggggcggcgcagcggagcatagcagcctccgcggcctgctgcgcccacagcaggcgcagcaggtgcacacggagggtgcgcacagtggcggcggcgccggcggcgctgacactttccatgatgaagcggcgccgcttgggctgcgggcgctgggcctaagtgcgttttcggccatggcagaggacgcgggcgtggcaatggacgtgaacgccacgtttgcccactccgcagcccacctgcactccagcaccatcatttctcgcctcggctcgacgatagcgattgcaggcggcagcgaaagcggtcataatggcgcgcctggcttcgccgcgcgcgccaacgccaacgcagcttctgttgctggagacatgacagcagtgaaggggaatgggccggcggcgtttcttcgcattgatgggattggtggtgggggcaacagcggtggcgacataagcagctctgtcgggtccagagccggcgccgctcctatcgctactcgggctgtggctgcgctgtcagaccctacggatatgactggcgtagcgcaggcggagcgggaggcggaggcgcacgcagcgaagggaaagacgggggcagtggctgctgactgccgctcttga

SEQ ID NO: 199 - DNA, 2570 bp, Chlamydomonas reinhardtii
atgtcgctcaccccagagctcatcacgcagtttgggcttctcggcaaggtgcgcaccgggcatccagtcctggacgccgtgctgtgcatgctgctgccgctgttgctgcgctgggcgcagccccggctgaaccgctgggcgctgctggcggcggcagcgttgcggcggtggtggtcgggagaggcggggtgcaaggaggtggtgcgcgtcatcgagcacgtggcggcggaggacggatactactacgaccccgacggccagcccgcgaacgccatcctgcagcgagcactgttggcctacaagcggcgccggcggctcgcagcagctggcggtgatgctgattcagactcgggcgatgaggattcggcggcaggcagcagtagcaaaagcagcgactgcggtagctcagtgggcgcggccaagcagcgtgaggcggcggcctacgggctgaacctggcgccgccggtgcgggtgtggcaggagctgggcaatggagtcgagtttatgcgctacacgtacacgcacgacagcagcaccgagaagcgccgccgcatcgcctccgtcatcaagctgcgcagccgcgcacccgacggcgcccgccgtgtgtctgacctcatcaccgcggccctgcagcgctaccggctcagcggcgagaagacctttgcctccttcttccacccggccaagtccgaggtgctgcggcttgtgggtcagttcgaggggcggcaggggcgcttctcggtgcccggctacccacacaagctgggactgctgctgtacggcccgcccggtacaggcaagaccagcctcatcaaggctctggcgcagctcacgggtcgctccgtggtgtcggtgccgctggcgcgcattgccaccaaccaacagctcatggacatcatgttcgacacgcgtgtgctcctgcagcgccgccacaactcgggtggcagcggcggcggcagcaagcggagcggcggaagcccccccaacaacgacttcggccccatgtgtgaggctgaggcagtggccctggctgccgcgctggcggagtctatggctggctcccccaacgccgccgccaccgccaccgctaaccatgccgctacagactacgccgccggctactccatgtattccagccaccggtggccctgcaaggacgcgctgaacctcgccggcatcctgaacgttctggatggcgtggttgacacgcccggccgcatcgttatcctcaccaccaactgcccggacagcctggacccggcgctgatccggcccggccgcatcaacaaggtcctgcacctgggtcggctgcggctggcggaggcgactgcgatgatgcgccactactgcttcccggctggaggcgacatggcatcagccggcatggatggtctgactagccgtacagccttcctgacggacgcggcgtgttggttccgccacatggagctggacacagtgtcgggcctggacccggagggcatcaagctgcgcgccgcgctggggctggaggcggttgactatttcatacaaggctactgggtgtggggcaagctggtggaggcgctggctgacgtggggtacgacagcaacagcctagtcagcatgccgtacgactggcggctggccgtgccgctgctggaggagcgcgatggctactacacgcggctgcggcgcaccatcgagcagcttgtggagctgacgggggagcgggtggtggtcaccagccactcgtacggagagaacgtggtgcggcagaacagccggcgccgccgtctgtgcggcgcgagctgtcgtgcgggcgagacacgcgacaccgcccagctcggggccctggcgggcttcctgacctccaacatggtcccgcgcgccgcccgcacccgcgtgtggcgcagctggggagcctcctacgccatgctgcctgtgggcgggccgggcgtgtggggcaacgcctcctgggcgcccgacgacacgcccgagatgcgggccaaccgccgcacgttcggctccatggtgtctctgtggccgcacaactggcaggcgctcatggccgccgccccgcagcagcagcgcgagcagctcagccagctggtcgccgaggtcacacggctggacgtgtcggggttcatcgcactgctgcgagaggtgggcggccccctggtcagcgccaacatcgcgcagtggggcgcactgcagctgccggcggaggaggcagccgaggcggacgtgggggtgcacatcagcgacggcgacggaacagtgccgctgctgagcctggggctcatgtgccgcggcggctggcgggaggcggggcacctcaacccgggagccatgagagtggtgggtgcggggcgggtgacccgggagtacaagcacaaagccgtgtcgatgcttcaggacgcaaggggcggccccgctgccgccgcgcacatcgacatcctgggcaacgacgcagtgctgcgggatgtgatcacggtggtggcgggccgggcggatgagctggcggacattgtcgtcagcgacatagaccgcatcgcagccgccgtggactgggccgcactggccgcctg

SEQ ID NO: 200 - DNA, 3129 bp, Chlamydomonas reinhardtii; identical to SEQ ID NO: 193

SEQ ID NO: 201 - DNA, 22044 bp, Chlamydomonas reinhardtii
atgaggaactttagtttgcgctgctctgcgctgctttctatattagcggcgggcgcgttgcttatgcctgtgtcagcccaataccaactgcgcctgaccgacgactatacacctgcgaacgccgttaagtatgagggccgagtggaggttgtctcgccgctaggctcgatttgcagtttcggcgagtttgatgacaaagatgctgcggtgatctgccgacagctcggcctgccaacggcgagagccagggcgctgtaccaggcctacaagttcatgtcgggcccctggaacgacccccaggccagcccgcccgaggtcttgagcctggtctcggcgggcgctccgccgatcgtgctgacaaacctcaggtgcaagggcgatgagacgaacatcggcagttgtctgtccgacacctccactttggcgctgtcggcctgctcccgcggccaggcggccggcgtccagtgttttgaagaggactacacagtgcgcctcatgacaaactctgtcaaccccgccaacgcgaccgccgtggcggcgctgaccgaggggcgcgtggaggtgtggctcggcgaggggtggggactagtcggggcgaccaatttcggtcccgacacggcacgtgttgtctgtgcccagttgggcctgcccgtgagcggcgccacggtggtgcccaatggagccgcggcatacggcgccccagcgtccaacacggctgttgtccttgacgggctggcgtgcagcggcaaagaggagaacatcggtttctgcagtccgcccagcaacacgccacccaggggcacggccttcgccgccgtggcgtgcaggcaggccgacttttctgtgcggctctcgggtgaggtctacaaccgaggacagtggggcacggtgtgccttggtggcttcgaccggtctgcactgttcactgtgtgcgtccaggcgggctggcgtacctcggatgcacgaaggccatccttcaccgccttcaacgccagtcgcctgcctgccgacccacgccctggcaccggcgccaatgcactgacgtctctgcgctggtgccctgacgacgccgagagcatcacgcagtgcggggagtacaagtatgatgcggccgccacctgcccggccgggctggacgtggtggtccggtgctacgagtcaccgccgctgtcgctgaacgtccggcccacgtcgctgtgcaccgacccatggaccacctccgccaccatctcgccccgccccggccgcaccaccatgctggtgggcgagttcgatggcgccagcggcggagcgcgcggccaggacgtgttgctggccagctacgcaaatgacggcaccctggttggccacgtggcctattcgcggccctggggcagctccttcatcgcagaggcagacattaacctgggccccacgcctgaaccaagggctcttgtgttggcagacctcaacggtgacggactcgatgacgtggtcgccatcactagtgagcttgtttcggtggcgacagcgaccagctcgcggagcttcacccccctcaccgtgtggctggacctgtccaccacctcggacagcatcgatacctccaacaccaccacccgcgcttacatcctgacggacgtgacgggcgacgcggccgcggacctggtgttcttcgaccggcccactctgcgcctggccttcttccccagcaaccgcatcagccagctgatggacgacacggacggcgagggcatcacgtggtttgagctgagcaccatctcggcccgctgcaaatcgctgggcgaggactgcttcctgctggcggccgacgtcaacggagacagcctcaacgacgcagtgctggtctacctcgatcgtgtcacggccgaccaagaggtgtacatgacgtttgtggccgcctcgccgcccgcgcccctcacctggcacatggccgcgcccgccttcttcccgcgcggcgcctgcacctcgccctgggcggtggtgatggggcagttcgtggggccggacggctccatcgacaacgtcaacgccggcagctccgtgccccaggtggcctgcatcagcagcttcgacgcgcgcatctacgtcgcgggcctggggtcctggggcgtggtgccgggccctcccacccgtgtacacgcccgtgacgtggacctggacgggcgcgatgacctggtgctgttcaccgaggccggctcctactacctgctcagcaccggctcggccttcgagccgcccgtgtccacggcgcgattcggcgacggctacaccgccagcgtgcccaccagcggcgaccgctcgctgggcgagaccgaccagaccgcgtcgaccatcattgcctccagtcagccggtgggcgatgcgcccgtggagcagcgctgcggcgcgcccgaccgcgtcatcgcctacttctccaaccggcgccccgaccgctcggccgcctgcaccgccgccgcttccgcggacccgtccgtgtcccccagcgcgctgacccgcgccgcctcctccgccacccacgtgatcttctcgcgcctgctgccggacgcggacgcactggacgtggcgctggctaacgaccgggacgggcccgtgctcgccaacctggccggcaacctgcactcggccagccccggcaccaaggtgctggtgtcggtgggcggccccggcgccggctccgacgcgctgtcgcgcctggtgctcaacgcgcagtcggtgggccgcttcgccaacgccagcgccgactacctgcagcgccaggggctggacggaatggagctcagctggcccgagctgcgggcggagcaggtccccgccttcctgtcgctggtgtgggcgctgtcgcacgaggtgcgcgcccggcgcgggctgctgctgggcctggcggtgccgccgcgggccgtgtacctggacctgccctgggcgggcctgggcgccgggctggacctcatcaacttccacgcctttgacctggagggcgacgaggtgctgggcgcggcgccgtacgtggagacgccgctgttcagctgcctggaggccaccgggctgtccgtcaacacgatgcttgcctccggcgcgcctccccagaaggtgactctggtggcgtcggccctgggccgcagcttcgtgctggacgcggacggctgggtgggcggccccggcagcgccggcccctgcctggggtccgagggcctgctggaccaggcggagctgcggctgctggtgccgccgggcggcgcgcagctggacaccgaggcattcgcaaacacagcgcccttcgcaggcaaccagtggactcacttcgacgacccgttcaccattgccaacaaggtgtgctttgcgcgctaccactgcttcggcggcatcgggctgtgggacgccgacgccgactcgtttggggcgctgctgggcgccgccgcgtccaccgtcaacggcgacccagcgctgtgcagcgagtacgagacgcccgagtgcacaaacacggtgtcgtcgtacggcaccacagacctgggtcagcccgagctggtgggcagtgtgggcgacgccgagtacagcctgttccaggtccgcaagagctggtcggacgctcgctcgcactgcaaggctctgggcggcgacctggctgcagtgaccagccgcagcgaggcgggcgtgctgtacagcctgctgagcaactgggcgggcagcgggcagctgggggaggcggacgtgtacagcggccgcgacgtgttcgtgtggctgggtggcagcgacgcggtgcaggagggccgctttcgctgggtcaacaccagcgccgacctgacctacacggcttgggcgtcaggccagccggatggaaggtacggtggcgaggactgcatggcagcggccatccggctgggcggcagcagcggcggcggtctgcgcatcgtggtcagccaggaggcgcagtggtacgacatgggctgtaccgcagcgctgcccttcgtgtgccagcgctcccgcgctggcggcatgggcgttgccggcgtcaagctggttccgtacctgaccaccagcctgctggtgttcccgccgctgaaccggggcgagccggggctgcagctgaccatggcgcagggccagaagctgtgccgcacctacggcgccgagctgcccagcctcaccgactactggacgcgctcggacatgacgtcgcccacgggctggtcgctggacctgccgccctacatgtggctgggcctgcgcagctacggcgaggggcagctgttctggagcgacggctcgttctccacggacggcgtgctcaacgcctgggagccgggcgagttcggggacgccgcctgcgccatcatcgtggggccgcagggcgtggagctggagctggaggtggactcgctgtacagccgctggaacgccactgccaccggaggcgccctgagccagggcgtgtactcgctcagctgccaggagcgcatgcccgtggtgtgccagaagagctctccgcccgtgtccctgtcgcccaccttccactgcctgacgcgccccaacggcctggccttcatggtgcccggcgagacgctggcgcccggcggcaacgcgctcacgcccgtggccagcgagctggagtgcgccgttgggtgcatgattgcgccgcgctgcgtctactacatctacctgcccggctggcgccccgccggctgggtgccgcccaacaaccagccgccggaggacttcgcgccaaacacctgctacctgatgggtcggccctgggtcacgtcctgggcgcccaagaagctgtccgaggtggtcaccgccgccgaccgcgtgtgcttccgctccaactccatcttcagcggcgacaccgcgcccatgtccgacccactcgtgctcgacccgcccaccgccgccgggccgctgttcggctaccccgcgccctcgcccaccgccaccgcccttcccttctcgctgctgtgctcgcccaccgccggcgccccggtgctggcgtcagtgagcctgacggttgccaacaccagccgcaacacgcaggacgtcggggtagggtgcacgggcgcggacggcggcggcgcggagcagcggctgtggctgtaccgccccgctgccggcggcgtgtacgaagcggaggcggactgcgggctgagcggcgtgcagggcgtcagcggcgccttcgatgcggccggactgtgctggctccagctgcagtgcggcagtggcgcggtgctgccggtgctggcgccggccgatgcccggcccggctgccccatgccccaggcggccggcagcggcggcggtggcaacttccagtacacctgcccacccggcatggtcggcacggggctgcagggcagcgccctgtccgccccctcgcccgccaccaactccatcgccacgctgcggctcattgcttgcgcggctcaagccacacgtatgtacggctacaccttgatatctacctacataaatccaatgtcacccacgctctacgaggtggcgtgttattgctactcaaatgtgccttctggcggcacggtcgacgccgcaactacagcaacggccgacgtggtttccggatcgttaacttatcgctgttctggtggcgtggtgcaatggcccgcaccgccgcctccacgacctcccccaccgccgttgccgcctaagtgccgcagcactcacaacccggaccgccaccgggcccgcttccgccgtcacctcggccccgatgcgcccgcctgctccgactgctcgccctggtttggcgactccacctcggactcgcccttctacagcagcggcacttacggcacgcagcccaacgccagccagccctactcctcgctgtcggccgcgtgcacgccgctgctgcccaccccggccggacaggaccacaccgtgcgggtgggcggcggctggctgccgcccagcaacgtgacgttcagccagacggccctcaatgcgaccgcctgcgacacgctaggcggcatcgcctcagtcgtgggcgccttcacgcacttcacgccgcagcgccccggcttcatcaccgccatgtccacaaggtgccgcctgaccgcaaccccgctggcgcagccggccctgggctcgccctttgtgggctggaacttcacctgcccggccggcctggtggtggtggaggtgctgtgggcgcagcagaccttgacgcggcccggactcggcccgctgccgctgatcacacgcgtggcgttccgctgcggactcagcgccgggctgctgccttcaccgcccgtgccatacgtatcgggcttcacggccaccgagtcctcgggcctggagccgctgtcgctgctgtgcccgccgggcgagtacgtgacgcaggtgtttggaagcacacgtgtgtggcatatgcccgtggcccatgcccgcctcaggtacgacgtgcccaccgcgctcagcggcgtggcgctgttcatccgcgacctgggcctggtgtgcagcggcggagcggccgtcacaaaggacctggacacgggcatcgccaccgtcaacagcagctctctggccttcaccaccgccagctgccccgccggcatcgcggtgctcaccggccgcgccctgcgccacccctcgccgcccgcgcccagcgcgactggcacccccggcctgatgctgagcctggacgcgctgtgctccgacaccgccgaccacacctcgcgcctcacctactcaccgctgctcagcaaggcgagcgcgcggcggatagcgggctccagaacctggcataagatacctcctacgtgtttgcgtcatcccgatggtacatgttctaacagctccgtcccttgtcgcaatcatgccacgtacctgctgcaggtcggcgagccctactcggagcgctgccgtgagctgacgctcctgtccggcctgagcctgctgcgctcgcgctgggtggtggggggcgtgacgaccggctacctgcacgggccgcggctggtgtgcatggacgtgcccgagcccgaggcgcggctgcccctggcggcccaactgcccacggtgggcggcgtcgtcagctcgcccgccacgcccttcctgtacgagtgccccgagggctccaaggccgtgtcggcgctggcgctcatggacgcctcgggagatgtgctctctttgcgcatcgagtgcgacaacgcgccgctggcatctggcgcacagacctcactgcaaagaattgcagcttccggcgtacccaacacacccatcgtgtccaacacggtcatcaacgtcaccgccaccggtgacttgacaccgatgaacgccatcaacaccaccgccaccaacaccaccggcaccggctcgagctcgggctccacgccgcctcccgactccggcgtactccgctacatcagcccggagctgatcccctcgccgccgcaggcgtcctacctgctgcagcgcagctgccccaccggcatctcgggcctgagcacccgcgccagccagacggacgtggcgcagctgggcacagcggtggtgccggtggcgcgcatggacctgccggacgcggcgccggccggcagcaccgcggcgctgtacgacgtgctgctggactgggggcaggcggcgctgttctgcaggaaccagggaggcagcctcatcaccttcaccagcaacgtccaggtggcctcggtggcgctgatgatccaggagtgggcgttcggcagtgttgtcgacgacgtgctgggcgtgtgggtgggtgccgagcgcacaggccctggcctgtacgactggtcctgggtgaacggcaccctgttctcggccagcttcgtgcctgcctggggcgccaaccagcccgacgacgcgggcggcgtggaggactgcgccgagcttggcgtcaacgtgaccgatgctgccgtggactggagggaccggggctgcactgggttggtgcgacggccgctttgcatgctcgtgcccaagtcggcgcaggcaggcgtgagctctagcgacgcggcggtgccggtggtggcgctgtcctccaacgacggcgccgacatcatcagcctctacaatgtgcagctgccctgggacgccgcatccacattctgccaacgccgcggcggcgcgctggcgtcgttcgatgcgcagttggagatccggcgcctcagcctggcggtcagcgcctacatgcagcccatcgccacgcagcccggccccgtacaggcctggactggactgcgcgcccgcctgccaagcgccggcacgatcagcaccgccctgcgcgcggcggtggcggcggtgcaggtggggtcccgcgagttcctgtacgtgcagcagcagcgcatgagcttcgaccaggccagcgcctggtgccgcaacgagggcggcgagctggcgtccataagtggcgatgagtatgacgccaccgtgtcggtggccttcgagcccgccgtcaacacactgctgctcgcacagcagcccgtgccgcccgccaccttcactgccaacgcctggatcggcctgtcgcgcgtcggcgctggcgcctggacgtggctggacaagagcccctacgtggcgagccgcaccatcatcgatgccgccaacaccagcctctcgtgtgtggccctggtcaccacctgcctcaacaccaccggcagcacaacctctgcgcccatcaactgcagcagcagctacgtggcagtcagctgcgccaacgacagctacggcttcgtgtgcgcccgacccacggacgccgcagcgagcgccatcgtgagcgggcgccacttccggctgtacccgcagcgcctggcctggcaggacgcggcgcaggcctgcaccgaccggggcgggctgctgggcaccttccgcacacaggacgagtacgcgcagttcaccgctgccgtgtccaggtcgcagccgctgctcaacgctacgggcctggccttcattaacgccactttgggcaccaaggccccggggttcatgcatgtgggcctcagcaggcggtcagatggctcattcctctgggttgatgacaagccttctcctgcaattaactgggctgcgaaccagcccaacggcacggcccagcagcgcgaggactgcgccgccttctccgtcatgtgcaacaacttcagcggcggactgtggtcgaactgctcgctacccgagcttcatgactcggagtgctctctggcggcgccgtacgtgtgctccttcgacttcatgtcggcgtggggctacagcgatggcaccgcgctgatgtcgcagcagccaggaggcatgggccccgtcacgccaatcaactatgcctggcaaagcgacacttgtggcgacatgctgaagaacacgcactacggcaacctgctgcctgacctcgccgtgctcaccaacgttgccaacgccaccgcttgctgtcaatcatgctcggcggtggatgggtgtgcctggtacacgcatgactccgccgcgcgcacttgcgccttgaagcgggacgaggggcctggccgccttgtcaacaacaccctcgcgcagtacacgaccgggccctcggggcggccgcgtgacctcatccccggcctgttcgaccccgcggttgccctgaccgactgcggcgccctcagctcgtctctgacgcagaacgtgtccgcgcccgactaccgcttcatgcctgtgaactgcgccacgccgctgccagtggtgtgcaagcggcccgccgggctgctggacctgacgcagcagcccaccgcctcgggcggcggcccggagctgccggaggaggagcggcttgcgctcagcacctacctgacgccgctagccaccggcttcaccagcgcgggcacggtggagctgtcgctgtacgacacgctgatggacgccttcgccgcgcagcagctgtgccgcgtgctgggcggcacgctggcggagctgatcgacctggacgtgcaggccgcggcgttccgtgtggcgcaggaggcgctgctgcagcagccgcggctgttcgcccccctgagctccatcacctaccacatcggcctaaccgacataacggacgaaaacagctggagatggatcagcgtcggcggcaagctgcaactggattcggcgttgtgggcggcgggcgagccgtcaaatgtggccagccccgtcttcagttcagacgccattccgctgagcgatgaggactgcgcggtggcaacacagtcgggcaacaccagccagtgggtggcccggccgtgtcgcttccagttcacccgcccgatgtgccagcgccccacatccgcctcggcctacggcgcgcagctgcggtccctggcgcccgccgcccagacgctgcagggcaccgcccacttccagctcttcacccggctcatggactggcccgctgcagagatgctatgccaggcgcaaggcggcaacctggcctggtttgacagccccctgcagtttgaggcggtcaccgcaatgacgaccagctggatgcgacgcaacgagcaggcatcaaattttggcacgtggttcggcctgaatgatcgggtaaccgaggatgatttccgctattctgccaacccacgcgtccgcgtcaatgccagtgcctggcatccatgggccgcaggctccagaggtcgagactttgtagatctgccggtgtcaggcgctacaaactttggatcgtggtcggcaacggtcacgtgccccaacggcactgtcgtgcgcggtttctctgctcgggtggacaatcgcacagctgctgtgtccacagcgacagacctgatgggtgggcctgtggccaagtgccccggcaactcatccaattacgcagtcgggctgcagcttcgagctgttgcaaagcaggactactcaatatttaaattggttcgaacatccgccaaccgtactgccaccgtaagcatggcgaactccagcgcctcggacaacacaatggtcaacggcgcatatatccggtgctgtagtgacgggccaagcgtcaatgattgcgcggagatcaggaccgaaattcgggatggcagcgcgacgactggtgtggcgaggtgggctgaccaaccatgcacggacgagttcctgctgttcgatgtgcccatgacctggtccctggccaagtccttttgtgcggctcactctgcggaattggcgcccgtcatggacagtatggagcagcagtcagcatccgacctcgttgctagctgggcccgtggccgcgtgggccgctccgtttcattttggtttggagcctccaacaccggcagtgagttcttgaagggcgcgcgcgacggcgcgccgtggcgttacacaaccggcgagcgtctgcgatggagcgcctgggggcgtgattccgtggccccgatccggccggcatgtggcgagatgcgctttggggtggagctggtgcccgtctcgctgtcgtcgctgctatccggctcgcgggtctcgcagtcgctgctgcgtgaggttctcacatcaaacaccaccagcggcatcgcacaaagcggtaccttccaacttcctcgtgtcggccggcggaaacctgggtgggcggccagtaactgcggccagcacctgccagtgctgtgccgccgcccgctgtctcgccgcccgatgccctcgcccggttctccccccagtgtgtccatgactctgcgggagacgcgctctacactgttccggcaagaaatgaactgggaccaagcggagaaattctgcaggcagcggggcggcctgctggcgagcgtgaacacggcctctgaggccgaggcgctgctggccatggtgcgcgagtgggcgcgcaacagccgcgtggcgggcgtcacccgcctgtggctgggctccaagctcaccaccggcaaccagcgcgggcccgcagaaaaccgtgtccgtaactggcaatggctcgacggaacctcgttcgactacgttcgggggcgcaacgatcggcggttcatcaacccgctgctgacgggcccgacctccgaggcgcgctgcctcacatggtcggtgtcagcttctccatctgttgcggccgttgccgccagcaacacagcagggccggggcagctggatgtgcggctgatccagcggcttctggatgcggccgacgctgtggacgagtgggaggccgtgtcatgcagaagcctagccctgccactttgccaagcagacctgcagcctttcatctgcaataagggtgacgcattcacgcgcccagtggactcgggcatcggcgccgacctgtactgtccgccagggactctccttgctggcatcaatggtcacgtgcctgcatccactggcggtggggttttggatcagcggccggtgtccttcgcaggcgtgtgccgcaacccgcgcgcgcccgccattttggcctcccggggtaaggaggaagtgccgctatgccggccgcgctggtcgctgccccgcgaggagggcccctccttcctggtgcaagccgccaaccggcctggcctgctgtccgcctgcgtcgacgcctgccgcctgggctccgtgcgcaccacctcgccctacacctcccctgcgctggcggtgctgtactccaacacctcctccaccctagccacctgccgctgcgcacgtgcgctgaccgggcagatgctcaacctaggccgcaacaccgccatcgccgccatctgcgccgccagcgagacccgcatgcgcaccgccgcgctggaccccgtcagctacaggctgggcctgactgacctgggctggacgccgcggctcacctctctggtgcgcgactccaagtaccgggtgttcaccaagcccaccgactggaacggcgcccagcgcctgtgcacgctgcacggcggccacctggcggtgctggaggacgcgcaagacgtggccgacctgaccgccctgctggcgaccaacctgggcgtggcctcggagctggcggggcaggcggtgtgggtggggctgtacatggcgcaggaccccatcttcaggtgggtggacggcacgcacctgcgctatggcgggctggaggtggtggtggactgggactgggcgcccaccaactgcggctacctgcgcctggagcgagtcaacggcacctggcgcggtagcctcaaggcgggaggctgcgacgccaaccagttcgccttcgtatgcgagaccagcacaattgtggacgacagcctgtctgacatcacccgcggcgaggaacgggtggtgcctgcctccgcgctgggcagtgccgcgttcggctcctggcgcgtgacgctcttccccgcgcactccgtgtcctggtacgacgcacagcgcatctgccgctggatgggccaggacctgatgtggtacttcaactcgggcgaggagtcgtggctgtcgtcctgggtggccgcctccaacctgagcggcaatgccggcaccgggctgtggacggcgctgagtgccgacaccccgccgcgcatgggctggcgcaccaccgctgccgactccaactcgcttgcgctgtcaacttggcagctgccgcgcggcctggacgccgccgcctccattcccgcaggcgacaccaccggagcctgcgggatgctcaagccgctgccgggcggcgggttcgcagtcggcctggcaagctgcggcgccgccattgcaccctttgcctgcaagcgcggccagcagtggaacggtccgccggcctcgcacagggtgcagctgccgccctcgcctccgccgccctctccgccgcctgccggcacgccgaattcgcttttggagtttgtccgcggccgcatgacgtacatgctgtttggagggacagggggccctgcaaccgactgggccacggctgcgggagcttgtgccaagcttggaggccgccttgcggagtttgcaacgtttagcgagtacatggccatctccgatactatccgccaatacgcacaaggccgcacctctttatcatatctgccctactggatgggcctccgccgagaccctgatgaccgccaaatcttccgttacacctcgggcagcctgccctctccgactgcgacggcttggggacggaatgagcctaatgacaacggcaatcgggaaaactgtgttgaaagccgggtgtacctgcgcgaggatgccgggttccgagagtatgcttccagcagcttgtttagcaacataggccttctggacagcagcactgggctcgccattgcgcagcaggttctgattgatttcacgtatgcgagcttgagcgaagctgagaaggagcagtggcggcgacagcgtaacatctggctcgctgtcaccgtgtctggggtccactacaatttgtacgggacgcttctgacgtggaacgaggccaaggcctggtgcgagggcaacggccaaagcgtcctagcagacttcatctcgagctctgaatacttggcggttgcgcgggctgccagtcactgggttcaagcgcaagcggcctatggcgagccggtcatacagatgtggtcgggttataacgcagtttcttacgacacatttgggaacaagcttgtgcttgtggccaacggcagttccgctgcatcccagtactgggttcccagcgagtacatgttttcgggattgcagtcttccccggagtgtgcatccattgtcttcagcacgcaagcacaggccatgtttgccctggctagcaactgcaacgccacgaggatgcggccgttgtgccgctccacccgtgctgcgctttcctcggcgacgccaacagggcctgcggcggggccgctgccggtgcggtcgctgtacgagctgcgccagtcggtgtcgtaccagatcgcccggggcgcctacgtgtacacgctcctgaccgaccccgccctgagggccagcttcatgcaggcccaggccatgtgccagttcatgcctggcgcgcccgggaccctggcgaccatctacacactagaagacctgaacttttttgctgacgttgccgcgcgcgcggagggcgacgcgccgaacgtatgggttggagccggagacttcctgtccccagactcgccgtactggtccatcgccaacctggacgtgaccgcgaacggcctggcgcctggctggctggacgaccctgaccgtgtgggcaacgagaccgccgcctgcgccttcctggacacctccgcccgcccgccccgactgcgccgcgcggcctgcagctcgcgctttgcggtgctgtgcatgtcatccaatgtgcgcggtgcaccccagcatgtggcgctggcggaggtgaccggcgacggcctgcctgatgtggttgtggccaccaactgcccctgggacaacggcgcctcgatcatagcgctgcagcagcccagccccagccaggctgtcctgcaggccgggccggacgccgacaccctcatcacgccctccatgtccgtccgcatgtgcggcgacggaatccccatctggcagcgcgaggaatgcgacatgggcgtggacggcacccgcatctgcgacgagtcctgccgcgtcactccgcgctacgtggtgcacgccagcgctcgcgaggcgttcatcaccgtgggcgacggcgacctcacgctggaccactggggcgtcaactacaacctgtacggccaggtccgcggctttagcgacctgcgcgaggcgcccaccgacccgctgctctaccccggattctttgccaacagcgccgacaacgtgtgtcccgccagccagcccgtgcccgtgcaccgcgtcaagaacctggcggccggctaccccttccagtacagggcgttcctgcgaacggacctgtcaacgcctgcgctgccgacatggacggacgttgagtcggcgtccgcctcggacccctccttcaccaacgccacctcctcctgcggctgcacgcccgacaaccccggcggccagcccgtcaacctcacagtggcgcagcaattccagtccatcgccatcagctgggtggtgggcagcgcctgcgaggcgggcgtgtccgtgacccgcagcctcatcaacccgctcacggggttgccgctcaacaccaccaccgtggcgcagctgtccatcgggctggagtgcagcgcgcagtaccggccctcaaagacggagatcgacgaggacatcgtccgagatgacctgcaggtcggcctgacctatcgctattgtgtggtggtggcatccgccgcctcctcggcctacttcctcaacgcaagcgacccgctgaaccccgaccgcttcgtgtcccagcccgagtgccgcgacgtgacaatccagtgggcaggccggctgaccggcgaggtccgaaccaagtttgacacgcccgcacctggcattcgcctgactgcccgcctgattggcagtccatacgtggtcagcggcattacggacgacagtgggcgctacgagctgacgctgcagaccaacgtgcccaactgcgaccccatcgtcgctccggagacttgcgtcaaccagttgatcaggctgaccgccagctcgcgcaccaagctgcgcagcggccgaatcatcccacaccagttctccatcaacaaccgcctgggggcggcacagacgctggcgctggcacacctgcaagtacaggagggtgtccgtatcctggatgagacgtcacttcccgttgcgggctttgttagatggccgggcacgcccgccaactcgggctacaatcagccacgcggctgtccgatccgcgacgcccaggtgtgcgccgtgaaccaccgtgacaacgtaacgatcagctgcgccacttctgaccctgatggctccttcctggtggtggcgggcatcggggcgtacgtgcggctgaccgccaagtacggcaaccactccttcgccatcaacatgccgggcggcctgccggtcgaggacacgggcgcgtttgagatcatggcgccggtgtatgacgttgacatccggaacacgcagacccgcacgctgcgggtggggctggtgggcgggctgtgccgctacgcgctgggcaagccacagctgcagttcacggcctaccagtgcgaggaccagagcggccagcgaccgctatatcgccgcgttgacttggaccccgcccagccgtacaccgacctcgtccttcctgccctggcctgggaggtgcagtacgtggacgtgaaggaccccatcccagacctcaacacgcaagccgtgtttcagtacctgctcattaccaaccagatctccaaatttgccaacctaagtgcgaacaccgactccgcggcgccgcccacgacgctgacctgggagttcttggcgccgaatgacattgaggtcgacgtgtgccgcaacgtcaagggcaatgctgtgctttgcggcgacatgagcctcacacgccagtgcgctggaaccacatcggcggccgccatcaaggccgtgtacgacgccttccagccgcccgacagcgcgctggtgggcaaggacgtggtgctgctgaggcgaggtgctcagtacaagatgcgaatgcggcttttcggccagtacggcaggctgcggtgcgacaacgtgtcagccagcattttcatgcaggacagcatcagcggggaggtggagaccaacaggtgcagcgtgaagaaccgcgggtgcagcaatgaggtggactatcagaccatcaccaacacctccgagtacatgtacgacctagtgccgctcgccatcaacttcggggcgatgacggcatactcgtcgccgctgtccattgtggcggaaagcaccggctggccctcgcgctccttcctgctctactccatcgtggagggcacggaggaccggctgggcacgggctacatcgaggtgcccatccccgtgccgctgctcattcttcgcgacccaccaggcgaccgctcttacgccacgctggacagctccatctccacagctgtgaagctgtccatggtcaaccacgaccacctcacatgcggcggaccaaacgaaaaagaaatcctgaccaaagcgttgccgctcacggagttaatgcccacagagaaattgaagataggcttcttcagaaagcgcatcaaccgggtcaaggaactcttctccatgagcaacatcaagaggaccatgggtgatgtgctcaagtcctctgagcgcaatctgtttaagctcctgaagggaggctataagtatgcgaccagtgcaaatgacggagccagcgcttacgacagtgataatgaccgtcctgccgaccctgctaagctggagcagggacgaggtggtgcgctcacatggagggagcttggggccgacctgcccagctcagcttctggccagcaagtccaagacaaagtcaaaggggtgattgaagagatcttcaaacaagctgacgctgacgtggacccggagctggtgctggcgggtctcgagcagatgctggacatggatgaggcccgcccggaggagttgatggcgcttctggtgaagagggtggacgagtttggaaaagaaatggcagcgagctctcggtactaccggtcagaagcaccggactttgaactcaacccatcggggctcgacgcaattcagccacagtgcgccaagtcgacgcttgggatcgggtttgacattgacatgggtcaatgcgctgggcttggagtgagcgtgtgcgctccactgctgcgggaccgcggccaggctggcatcgtgactgaaaaggcttggtacaacgatgaggaggaagatagttcctataagcttaccatcacccgcgcggagggcttctccactcccaaggagagcacgccggagctggtgggtggcgacgccgacatgatcctggcgcccaccttcgccatcatgttcacgcttcaggaccggctgcagttcgacaccaagacctgcacacccacagccaccatgggcatccccggctggaacgtgcgcgaggacgcgcatggcactgcctggcacagcgtgtggcacatcaagaacgtggtcgtgccggagctgcagaagcggttggcaggcgagcaggccaaagcggcggcggcgcagaaccccagcgtcatcaacaacctgaaggagggcatggcgggctggcagaacatcctcaaggtctacaacgacctcaatgctcttgcgacggaacgcgaggaggagctgccgtcctaccagctggagcagcaggacgtgaacgggctgactcagggcaccatcgagggcatctggcacaccaccctggacgaccacccggacaggcacatggaggcgtacgagggtcgcaccatcgactgggagcggctggagaagtcgccggtgtggaagcagggctacttcgagggcgcggagaagctgcagagcctgatgctgcgcacccagaggtacatggacgcctcggccacccggggcaacgtggtgttgcggccgcaccagaaggcggcggtgggcggcatcgtggcgggcaagcagctggaccagctgaaccgggtgtacggcaccaacttcaacaccttctccttcagtggcggaggcggcagctacacctacagcctcacctcggccagcacgctcagcaccaagataggcttcagcatcagcttcaaggacatgttcgggttccagggtggcggcggcggaggcacaggattctggatggaatcgtatgatgagaacctgtacggcttcgagctggagttcaacagccagctgctgcaggagacggagcgggagcgggtggtgacggtgcactttgaggacaaggacgtgggggacagcttcctagtcaagatccgtcccgacacggcgtacggcacgcccatgtttgagctgctggcggggcgcagcaagtgcccctacgagcccggcacgctgcagcgcgagctggcgcgtgtgtctgtgctgggcggcctgaacgtgcagcagaacatcaagcagggcgacagcaccgtgtacgagctgctcatcgagaacaggagcggcaccgacgagccggtggcgatgcagctgggccccgacctggccaccaacaacgcaaacatgcagctgcagctcatgggagcaccctggatcgagcccgtgccgtacaagctgcgcggtcccatcgccacccagaccaaggcggttgtgacggcccgctgcggcccgcgctacctaacctccgccgtcgacatcgtgtccacaggcacctgcgacgcagccgagttttcgcgcacgccgctgacgctcaagtgctacagcgtgtgtcccgaggtccgctggccccaggcctggcccctgactgtgcccctgatctacaatgcgaccgatgccctgaacaagaggaacatcacgctgacgctcttcaacccgaactacgccacccagaagtgggccacgcacccgcggctggccacaaacgttaccatgattcaaattgagtacgtgaacacggtcagcagcggcgggctgtggactccagtgcgaagcctcaacgggagcgctgtcaattttgccaagattgaggacgccgcatttgggttcgccacgttccaatggccggcttggcagttcctgaccagcgagggcgactacctgctgcgctacgtggtgtactgcgacatcctggtgggcggcggcatggacagccgctacgagggcagccccatctccctgcacgtggaccgcaccacgccctggcccgtacacaactccctcacgccctacgacatgacctacctgccgggcgacgagatctatgtggactttagtgagcccttggactgccggcagcccttcgccttctggtggctgggcttgcaggccgacggcctcgccaaccgtaccttcagccagcagacaggtgacttcatccccacctgctcgggccggcgcatctcgttctcgtggaaccccttcaaccgccccacgccgctgaccaacggccagaacgtcagcctgcagctgggcggtgtgcgcgacctggcgggcaatgtgcagacgcgcgccgtcaacatcacctttgtcaccggcacactcgcacccaacgcgcccatccgcctcaactttgccatgggcccgctgcccaccaccgtgcgccgcctgctcttcgccaacgggccgggcgccgccggctccagcctgccgcaccagctgccgcaccgcctggcgctgcgcgactacacggaggagtccctcgccgcggagctggcctcgcgcctggccgcgcgccgccgcctgctggcagagctgaacgcgctgctgggcgagtgcctggggccgtggccgcgcggccccgaggcgccgggtgtggtggccagcagcgtggtgcaggacgaggacgtggcgaccatggtggtggagctgcaggcgttcggcatactggagagcgaggaggaggacagggtgggctcgggcgaggacgcgggtctgggcgggccgcgcaaggacgcggtgtgggtggcggagcggctggtggcggcggccgccgacaacacgtcgtgcctggccacgcggctgcagcgggcgtacgcgccggtgcggagcgtgtttgcgcaccgcagccccgagcggcagctgctggacggctggagcagtgaggaggtggcggtggcgcgcaggcgtgcagcagccgaggcgcgggccaagggcctgccgggcgcctggctgggcgcggtgcagtcgctgcaggctgaggcgcaagcagcggcggaggcgcttgcgcaggtggcggagcgggccctgaagagtatgctgggtgagcctgagagcgctgcagcagaccccggcactgtaagcactgacgctgcctcagacaagcaagagccgtatgatggggacaagcagctggtggcggcggctggagcagtggccgccgccgctgtgacgtccgacacgcggcagggcactggcaatgaggagcagcagccgcaagtggcggctgtgtctcgccgcagcatggtcggtacatacggtgtgtgtgtctgcacctggttcagtgctgctgtcgttagacaaaatgggagagcagcagcagcagccttcggcgggtctacgcgctggagctggccgctggacttcacggacatcggtaacaacgcgtctacgctgcaactgtacccgtctacgacttcacttcttaattaa

SEQ ID NO: 202 - DNA, 2172 bp, Chlamydomonas reinhardtii
atggactttcgggaaaaaggcgaactggaccgcactgctaagcgagttgactgctacacggcgcccgccgtgacgcagggcaacagcagtaaggcgaccgtctcgttgtgtcacagccgcaatttggttctggacacgtgcgggttcctggcggcgcgccagcgcggtcagatgagtaagaagttcccgcggccgctgcggggcgcggtgcggctgggcggctgcgagctcgccaacgcaagccgactcgcagagcgggacccgcggctgggatggctgcgcagcatgcagcaggccgtgtggtgggagaacgccacccgggatgacgcgggtgtggcggccgcctgcacgcctgggtctcccaccctggtcaccacgcccacgctgttcgtgctgcgggaccggcacgccaactacgcccacgagatggaggttgtgtccatggccttcagcttcctggcggcgctggagccccgcgacgtggcggagcagggcgtgcaggtggtgattgccgaccaggcgccgcccactggtttcttggagacgtgggcgcgcatgagtcagccacaccggctgcggctgctggcgcaggagcccttcccgcccggaacctgcttcgcctctgcctaccacgtgtacaccttcgccgccggcattggctacaacaccaacccagccacggtcaagtgcgaaagccccgtgctccagggcatgagccactggctgcggcagctgtacgacgaggcggacgcctctgcgcgctccgctccctcccaggcgtccgcggctgcggcggtggctgggccggccactgccgcggcaggcatcaccggcctccgggtgccggctggcggcatcgtggtgaagaacgtggtgtggctcagcaggaggaacctggagatggtgcgcctgctactgaacgccagcgtgggctggaagagcatgcgcatggtgcgcaacgaggacgccgtggtggcgggtctggtggcggcggtgcagcagtggaacgccgagagctgcctgctgcgccgctttgaccgaaacgtggcggcggaggtggagcgatccaaagaccacctgcgccccgtgcacggtggatcagccgccacaaccaccaccgcagcagcagccgccacgaccaccgcaggagcaaggaagcggagaggactgctgggcaaggcctgggcagccctagcgtcagcaggccggcggctgctaggggccgctgccttgggtaacgacctagattcggactcacaaccgcaatcagctgtggattcaggagggcgtcgaatacgacaagccgatccggattttgccggagatgaggaggaggacggggaggaggaggaggaggcggaggaggagggggcggatgtgagcgcgagtcaggacggtggcggggagggggcagaggcagagggcgagtttggcggggccgacggcacggacacggtggcggttggcgccgccgtagccgcctcaaccgtcaaccgcacccgcccgccatacatggtgggcgggaacattatcatgctgagtaagctgtgggcgctggacaagcaggaggaggagcagcagcaacagtcgtcaacagccagaaccgccgcctcaggcggcgccgccaacggtccatgccggccaaccaacgttctgttcaagttcgttgacggcgacttcaacgacgcgccgtacagccagcagctggccaccatcttccgcacaggcgtgttggcgggcgtgcacggcgcaggcctgacccacggcttctttatgcagccggggcagggcgcggtgctgcagctgctgggcgactcgttcgcgcaggtggctgccaacaacgttttccgcaacatggcccggggcctgggccaccactacgaggacgtgccctacagcggcgtggacgtggacgtgccgcagctgcaggcggccgtgaagcgctcgatggactatgtggctcagcaggtgatggaggcgcaggagcggcgcagcggccctctacgcttggtgctcgttgatcagaaccacttcagtgtggtgatgccgccggcagagacttgcccggtgctgacgctacagggcacagcgacagcgacaatgtcggggactggggaagggcaagcgggacccgaagaagggcaggaggttgcgggtgaaggggcgcggtag

SEQ ID NO: 203 - DNA, 879 bp, Chlamydomonas reinhardtii
atgctcggccacaccctcggccagaacggctcgggccaggcgaccatcatcgacatcggctgcaaccggggatacttcaccagcaccgccctcaactattgggcgccggggtttggcaaccacaaccggcttgtgcatgaggtgcaccaggccggggggcagtacggcggtggggcgtgcggcgtgtgcggcgactgcgtgcacggccccgccgcgccggtgacgctgcagccgcaggacgaggtggacgtgcactgcttcgagccctcactgtggcaccagagggcgctgggggcggtacgggcggctctgtacgggccagtggacgcgccaaagacagacaagggcacggcggtgcggtggcacgtcctgccgtacgccgtgtcgaacgccaccggcaccgcgcacttccccaccaactgcacacacgaggagtgcaacttcgacctgaacgagcagaaggctgatgtgaatgtcaccacggtggacgactatatgaagcaggcgcgcatccgctatgtggacgtgctcaagatagacacggagggtttcgatccggcagtcctggcgggcgcctacaacacacttaggcggcaccgagctgaggtgttatctttcgagtaccatggattctggttccgctccggcggcacgctgcggctgtgcctggactacttggaggagctgggctacagctgcttcttcgacgcccccctgctgttcaaactgacggggtgctgggacccgcgcctcgagatcaaagagtggtcgaacatcgtgtgtgcggtgcgcggcagcgagacggaggcggagatgaacgccctcacggcactgaggcagcagcgggcggcgcatcaagcgcacgaggggcggcggtag

SEQ ID NO: 204 - DNA, 1388 bp, Chlamydomonas reinhardtii
atggttttcccagccctggtcgattggttctcgaggccctcaggcaacacgggctgcaccacctgtgggctcttccgaacaaccaatggcacggagatcccggtgccgctcaagcgccgcgacgtgtctgcaaccgtctacgccgatgcttcctttgccgataccacggagaatctccgctacaagagcgatgcggagtgctcagcagtcttccgtttcccgttgccgccgtgtgcagccgtgtacaggttccgcgccgtgtttggagaccgcgaggtggtgaccaaggtcaagccccgcgccgccgcacgcgaagagtacgactttgccgtgtcgcagggccactcggccgtgcacatgtcccagcacgaggcgggtgcgtccgtgtttgaggtgtcgcttggcaacctggcggcgcacaccgaggtgacggtggagttcagctacctccggctgcttgacgcgttcggcggcacgctggagtggagccacaccgccacgtgggtgccgccttacgtgggctcagcgggcgacgtggcgaccggcgtggacaaggtggcggcggcgctgcccacctttgcgcccaaggtgacctacgtcctctcctacgaggtcacggtgcgggcggaggcgggcacggtgcgtgccattgagtcgcccgagcctgtgaccgtggagcgtccgatgccaggcatcaaacgcggcgaggaggagctctggtacgtgcgtctgtcggagcaggtcgccgacccctccaaggacctctcactggcgattgaggtggatcccaaggccgcgcgccgcagcggcctgcgtgtgcagcgcacgcccgcctcccgcggcggcgagcagcgcactgttgcgctggccacatttgtgccaccgctgcccagcccgaccgccgccggcaccgacggcaagcagcagcagctgcgcaaggagatctgtggattcttcggcggcggcagtttagccacctgcatagcggcgcccttcggcgccaatgcggcacccgccttctgcaactttgcggcggcgggcgctgcggcgagcaacgtgccggagctgctgtcgcgtctcaacctgcagcgcaccactgagggctactgggtcgctagcatggagctcgcgaccctcttgggccagacggctgaaagcctggcggcgctgcacccgcgccgtcctgccggcctgaccgacgacgcctgggcgactgtgatcgtgctgggtgtgctgcggcgctgcctggcggctcagcgggaggtgtgggcggacatggaggccaaggcgctggcatggctggcggcggcatggccggagggcggccgcagcgtgggaagcaccgtcatggcgctggcaaaggcgctgacggtgcttcccaaggtgtg

SEQ ID NO: 205 - DNA, 1803 bp, Chlamydomonas reinhardtii
atgctgttgtccgggcgctgcaagcgtggcccgtctcgatgtgttcgcgccggggcctcctctggttcgaatcctctcattcctcggcatggacagccacagctatcaagcatgggaccgtcgcggcaacagcttgcctcagcgccaaatgcggcttttgcagagctcgaagcgctgcccgcagatgaaccagctgctccggctgcggtttccaaatgcccagtcacacaaatgaagagcgcacttagcgcatttgtgcgtgactctggagaccaagttgccgaaaccggagcgccaaccgcaacgcgaccaattcctgggccagcaccgctcagtctggaagcactgaaggacgtgagcgtcatcttcttcgagggcttgcacgtggcacagctcaaattcagcgagaagtacgggcccgtctgccgcttcgccaaccccgcctcgctcaacggcgccaccagctgggtgttcatcaacagcccagagaacatccagcacgtgtgtgcgaccaacgtgcgcaactacagccgccgctacctccccgacatctacacgtatgtgacgcacggcaagggcatcctgggctcgcaggacgagtacaatgcgcggcaccggaggctgtgctcgggccccttccgcaacaagtggcagctgcagcgcttctcatccgtggttgtggagcggtccaagcggctggtcgacatcttcagtgccgccgccgccgccgacccgtccggcgccttcaccaccgacgtggccacccagacgcagcggctgactctggacgtggtggggctggtggcgttcagtcacgactttgcgtgcgtggagcaggtgcagcgggacctggcgggcgccaccgcgggcgacgggcgcagcggcgtgctgcaggaccgcgtgctgtgggccgtcaacacctttggcgaggtgctggcgcaggtcttcatcacgccgctgccgctgctcaaggccatggaccggctgggtgcgccccacctgcggcagctgggcgaggcggtgtccgtcatgcgggcggccatgctggacgtgatcgcggagcggcgtgcctcgctggccgcgggcgggcggggccgtgacgacctgctgcaggcgctgctcacggccacggaggatgacggccggggcctgagcgatgaggagctgtgggaggacgtgcacgacatcatgggggcggggcacgagaccaccgccaccaccaccgccgcgctgctgtactgcatcagcgcccacccgcatgtgcgccagcggctggaggaggagctggatgccgtgctggcggacggcgaggcgcccacctacgagtcgctggagcgcatgccctacctgcaggcctgtgccaaggaggtgatgcgcctgtacccggccatccccgtgttcccgcgcgaggccgcccggcccgacgtgctgcccaccggccacggcgtggcggcgggcgacgtcgtgttcatgagcagctacgcgctggggcgcagcgaggcggtgtgggggccggacgtgctggagtttgacccggacaggttctctcccgagcgcgaggcgcggcagcaccgcttccagtggctgcccttcggcgccgggccgcgcatgtgcctgggcgcgtcgttcgcacagatgtctgtggcgctcatggcggctacgctgctgcagcgcttccgcttcacgccgctggcgccctgctccccgctcatcccggtgggctacgacatcaccatgaacttcggaccctcgggcggcctgcgcatgcgcgtggcgcccaggcagcgcgggcagcagcagtag

SEQ ID NO: 206 - DNA, 2001 bp, Chlamydomonas reinhardtii
atggggtcgggtcgtgacggccggcctgcgagctacaccaagaagaacttctccctggagaagctcaagctcagcagcatgaaggatgacctgaccgttctgcgccatatgtggttcggcagcaagaagggcgatgatcacgctgctcgcctggagagcttctacgggccccaggccgctgcctatgatgctttccggtcgcggttcctctggggtcgcaggcccatgctcgctgcagttgctgcccgcctggccgagcgctcgaacctcatctgggttgacctgggtggtggcactggggagaatgtcgatatgatggctgattacatcgacctggcgaagttcaagtccatctacgtggtcgacctgtgccactcgctgtgcgaggtggccaagaagaaggcgaaggccaagggctggaagaatgtccaggtcgtggaggccgacgcttgccaatttgcgccccctgagggcaccgcgacgctcatcaccttctcctactcgctcacgatgattccaccgttccacaacgtcatcgaccaggcttgctcgtacctgtcccaagacggcctggtgggcgttgccgacttctacgtgagcggcaagtacgacctgcccctgcgccagatgccctggtcgcgccgtttcttctggcgatcgatcttcgacatcgacaacattgacatcggccccgagcgccgcgcctacctggagcagaagctggagcgcgtgtgggagcagaacacccagggttcgatcccctacgtgccgtggctgcgcgccccctactacgtgtggattggccgcctgcccagcgttggccacgccctgcacgaggagcgcgtggagcggccgcccatgttcccgcccaccttcctgtacacgcagtcgtgggaggaccccgagccggatatggaggtgatggagatcaaccccaaggacacggtgctgaccctgactagcggcggctgcaatgccctgaacctgctggtgcagggggccggccaggtggtgtcggtggactgcaaccccgcgcagtcggcgcttctggagctgaagaaggtggccattcagcagctggagtttgaggacgtgtggcagctgttcggcgagggcgtgcacccgcgcattgaggagctgtacgagaagaagctggcgcccttcctgtcgcaaaccagccacaacttctggtccaagcgcctctggtacttccagcacggcctgtactaccagggcggcatgggcaagctgtgctgggtgctgcagtgcctggccgtggtgctgggactgggcaagaccgtcaagcgcctcgccaacgcgcccacaatggaggagcagcgccgtctgtgggacagcaacatgctcatccacttcgtgaagaacgggcccaagccgctggtgtggctgttcgtcaagttcgtgagcctggtgctcttcaacaaggccgtgctgtggttcggcggcggcgtgccgggcaagcagtacgcgctgatcaaggcggacggcatccccattgagaactacatcgcgcgcaccatggacggcgtggcggagaactcgcacgtgcgcaagcagaactacttctactacaactgcctcaccggcaagttcctgcgcgacaactgccccacctacctgcgcgaggcggccttcgccaccctcaagagtggcgtggtggacaacctgaccgtctccaccaacttcttcatggaggagctcaaagcgcgcacctacaccaaggtgattctgatggaccacgtggactggctggatatgcccgtggccaacgagctggccgagtgcctggccaagcaggttgcgccgggcggcatcgtcatctggcgctccgcctccctcagcccgccctacgccgagctgatccagaaggcgggcttcgacgtgcgctgcatccgccgcgccactcagggctacatggaccgcgtcaacatgtacagctccttctacatggcccgccggaagggcgccaagaaggacaactaa

SEQ ID NO: 207 - DNA, 127 bp, Artificial Sequence
  amiRNA cloning fragment
gatctgagatctacggtaagctgttagtgattatctcgctgatcggcaccatgggggtggtggtgatcagcgctataatgactaacagcttaccgtagatcttcgtgccgcccggctgcggaggtgg

SEQ ID NO: 208 - DNA, 127 bp, Artificial Sequence
  amiRNA cloning fragment
gatctgagatctctgaatctggcttattctatatctcgctgatcggcaccatgggggtggtggtgatcagcgctatatacaataagccagattcagagatcttcgtgccgcccggctgcggaggtgg

SEQ ID NO: 209 - DNA, 127 bp, Artificial Sequence
  amiRNA cloning fragment
gatctgagatctatgcagtaccgatgtttcaaatctcgctgatcggcaccatgggggtggtggtgatcagcgctatttgtaacatcggtactgcatagatcttcgtgccgcccggctgcggaggtgg

SEQ ID NO: 210 - DNA, 127 bp, Artificial Sequence
  amiRNA cloning fragment
gatctgagatctgtgagaatgcaatgtggaacatctcgctgatcggcaccatgggggtggtggtgatcagcgctatgttttacattgcattctcacagatcttcgtgccgcccggctgcggaggtgg

SEQ ID NO: 211 - DNA, 127 bp, Artificial Sequence
  amiRNA cloning fragment
gatctgagatctctggattcgatcaactagttatctcgctgatcggcaccatgggggtggtggtgatcagcgctataacaagttgatcgaatccagagatcttcgtgccgcccggctgcggaggtgg

SEQ ID NO: 212 - DNA, 127 bp, Artificial Sequence
  amiRNA cloning fragment
gatctgagatctcggcaattccgatttgagtaatctcgctgatcggcaccatgggggtggtggtgatcagcgctattacacaaatcggaattgccgagatcttcgtgccgcccggctgcggaggtgg

SEQ ID NO: 213 - DNA, 127 bp, Artificial Sequence
  amiRNA cloning fragment
gatctgagatctgagtggtttgtgttcttctaatctcgctgatcggcaccatgggggtggtggtgatcagcgctattagtagaacacaaaccactcagatcttcgtgccgcccggctgcggaggtgg

SEQ ID NO: 214 - DNA, 127 bp, Artificial Sequence
  amiRNA cloning fragment
gatctgagatcttcgggaccatagtgttacatatctcgctgatcggcaccatgggggtggtggtgatcagcgctatatgaaacactatggtcccgaagatcttcgtgccgcccggctgcggaggtgg

SEQ ID NO: 215 - DNA, 127 bp, Artificial Sequence
  amiRNA cloning fragment
gatctgagatctgtgggacaggcacaacaaacatctcgctgatcggcaccatgggggtggtggtgatcagcgctatgttagttgtgcctgtcccacagatcttcgtgccgcccggctgcggaggtgg

SEQ ID NO: 216 - DNA, 127 bp, Artificial Sequence
  amiRNA cloning fragment
gatctgagatcttagatgcggtgaacatattcatctcgctgatcggcaccatgggggtggtggtgatcagcgctatgaaaatgttcaccgcatctaagatcttcgtgccgcccggctgcggaggtgg

SEQ ID NO: 217 - DNA, 127 bp, Artificial Sequence
  amiRNA cloning fragment
gatctgagatctgtgcagcatgtctcctatgcatctcgctgatcggcaccatgggggtggtggtgatcagcgctatgcaaaggagacatgctgcacagatcttcgtgccgcccggctgcggaggtgg

SEQ ID NO: 218 - DNA, 127 bp, Artificial Sequence
  amiRNA cloning fragment
gatctgagatctctggatgacgattccttcatatctcgctgatcggcaccatgggggtggtggtgatcagcgctatatgtaggaatcgtcatccagagatcttcgtgccgcccggctgcggaggtgg

SEQ ID NO: 219 - DNA, 127 bp, Artificial Sequence
  amiRNA cloning fragment
gatctgagatctcagatcattgtggaccaatgatctcgctgatcggcaccatgggggtggtggtgatcagcgctatcataggtccacaatgatctgagatcttcgtgccgcccggctgcggaggtgg

SEQ ID NO: 220 - DNA, 127 bp, Artificial Sequence
  amiRNA cloning fragment
gatctgagatctatgcgttgtttgatctgcaaatctcgctgatcggcaccatgggggtggtggtgatcagcgctatttgtggatcaaacaacgcatagatcttcgtgccgcccggctgcggaggtgg

SEQ ID NO: 221 - DNA, 127 bp, Artificial Sequence
  amiRNA cloning fragment
gatctgagatctttgcgctccacatttaaaatatctcgctgatcggcaccatgggggtggtggtgatcagcgctatattataaatgtggagcgcaaagatcttcgtgccgcccggctgcggaggtgg

SEQ ID NO: 222 - DNA, 127 bp, Artificial Sequence
  amiRNA cloning fragment
gatctgagatctctggctttcctgaaccacaaatctcgctgatcggcaccatgggggtggtggtgatcagcgctatttgaggttcaggaaagccagagatcttcgtgccgcccggctgcggaggtgg

SEQ ID NO: 223 - DNA, 127 bp, Artificial Sequence
  amiRNA cloning fragment
gatctgagatcttagcctcgatttgcagattcatctcgctgatcggcaccatgggggtggtggtgatcagcgctatgaaactgcaaatcgaggctaagatcttcgtgccgcccggctgcggaggtgg

SEQ ID NO: 224 - DNA, 127 bp, Artificial Sequence
  amiRNA cloning fragment
gatctgagatctttgggtaacgacctagtttcatctcgctgatcggcaccatgggggtggtggtgatcagcgctatgaatctaggtcgttacccaaagatcttcgtgccgcccggctgcggaggtgg

SEQ ID NO: 225 - DNA, 127 bp, Artificial Sequence
  amiRNA cloning fragment
gatctgagatctgaggtgttatctttcgtgtaatctcgctgatcggcaccatgggggtggtggtgatcagcgctattactcgaaagataacacctcagatcttcgtgccgcccggctgcggaggtgg

SEQ ID NO: 226 - DNA, 127 bp, Artificial Sequence
  amiRNA cloning fragment
gatctgagatctcagcatgcaggatattgattatctcgctgatcggcaccatgggggtggtggtgatcagcgctataatgaatatcctgcatgctgagatcttcgtgccgcccggctgcggaggtgg

SEQ ID NO: 227 - DNA, 127 bp, Artificial Sequence
  amiRNA cloning fragment
gatctgagatctccgcgaccaattttagtttcatctcgctgatcggcaccatgggggtggtggtgatcagcgctatgaatctaaaattggtcgcggagatcttcgtgccgcccggctgcggaggtgg

SEQ ID NO: 228 - DNA, 714 bp, Artificial Sequence
  cloning fragment
atggtcgagtcgtgccgcccggctgcggaggtggagtcggtggccgtggagaagcgccagacgattcagccgggcaccggctacaacaacggctatttctactcctactggaacgacggccacggtggcgtcacctacaccaacggccccgggggtcagttcagcgtgaactggtcgaactccggcaacttcgtgggtggcaagggttggcagcccggcacgaagaacaaggtgatcaacttcagcggcagctacaaccctaacggcaacagctacctgtccgtgtacggttggtcccgcaaccctctcatcgagtactacatcgtggagaacttcggcacctacaatccgagcaccggcgcgacaaagctgggcgaggtcacctcggacggcagcgtgtacgacatctaccgcacacagcgcgtcaaccagccctcgatcatcggcacggcaacgttctaccagtattggtccgtgcggcggaatcaccgcagctccggttcggtgaatacggccaaccatttcaacgcttgggcccagcagggcctgacgctgggcacaatggactaccagatcgtggcggtggagggttacttcagctcgggctcggccagcatcactgtgagcaccggtgactacaaggacgacgacgacaagtccggcgagaacctgtactttcaggggcacaaccaccgccataagcacaccggttaa

SEQ ID NO: 229 - DNA, 18 bp, Artificial Sequence
  cloning fragment
cgcagccgggcggcacga

SEQ ID NO: 230 - DNA, 1546 bp, Chlamydomonas reinhardtii
atggctgaagcctttgaagaatggcttgataagcatggaggaaaaaagcacgcgagtttagacctggtgaaggaacttccgaacggcgaccgtggcgtagtggcgaccgcgccaattgctgagggcgaacttctgcttctgttgcccatcaactgcgcgctgtacatgccaaacgatgaggagtgggccaagcgtggcagttccttcccggaggcggtgggctacctgcatgagcaccaccgcaccctgagccccttcctggccaccacgcttgcgctgatgtccgaggtggcgcgcggcggcgagtcggcctgggctgcgtatgtgggcacgctgccgccgtcgtgccccgactgcctgctcaactggagcaaggaggagaagaaggacctggagggtacggcgctggaggagctgggccccgaccccgccgccgacgccttcaagcgccacgtggcgccgatcctggccgcccgccgtgacctgtggccgctgcagcagcagggcgagggcgagggcggggcggctgctgacgaggcggctgccgacctggcgctgtttgtgcgggtggcgggtctggtgcagagccgcgccttccacctggaggcggagaactgggtgtcgggagccaaggagatctccaagctggagggcggcggcacgcaggtgttcctgctacccggcatcgacatgatcaaccactcccacaaccccgcccgccgcaacgcgcacctgcagcggctgaacgtggcgcaggcggcggctgccaagctgacggagggcggcgcgccggagggcgtggaggcgttcttcgtgatgcgggcggacaagcccatcgcagagggcgaggaggtgctccacacgtacggcaacctgtcggacgcgcagctgctgcagacgtacggcttcctggattcagaggacggcttcgcgcagcttccgggcggggctgcctccggatccggatcccaaccgcctgaagcggctgcggaggaggagggcggcaacggcgggaagaagggtggcaagaagcgcggcaaggccggggcgtctgccgccaaggggaaagaggaggcggaggagggggcaggctaccgcaacccctacaatgcggctctggtgccgtgggaggcggtggaggacgtgtgctgcggcctcatgaagtccatggaccagggcctgcccgccgctctgaagcgcgccaagcgggagttcctggctgctgccggcgtgctgcagctgtctctggggacggcgctgctggaggaggatgaggactttgcggagatggtgtgcatcgccacgttgcaggtgctcaagtcttgtgtggagcgctacccctccaccagcaaggaggacgtgcggctgctcaagagcagcgagtgcaccggccggcagcgcctggcggtgcgggtgcggctgggcgagaaggatgtgctgcagctggcgcaaaaggcggtggtcggctacggcgcggacgagttcgatgacggcattggtgaggcgcacgaccgcggcaaggcgcacgaggcacccaaggccagcg

SEQ ID NO: 231 - DNA, 22870 bp, Chlamydomonas reinhardtii
aggaccctcagtctgccttcctcacgtgccaaggccgtatttaaggcctggaatgagtacacacggggtggcccttgggggaacggcaagcccgcgtctgctgaggagatcctggcatacctcaactccgtggacccgcccatcaccatgaccaacctacgttgccggggtgatgagaacagcgtcactcagtgcgagcgcgacgtgaccaacctcggacgctgcactcgggctcagtcggtcggagtgcaatgctttgaagacgactacaccgtccgcctggtcaacaacgccagccaccccttcctggccaacggcctgaagcagggccgagttcaggcctggctgggaaccgggtggggctacgtgtcaagctctggcttcacgaacgaggatgcgcaggtggtgtgtaggcagctcaagctgcctactgttggagcctatgtatttggcaacgtggagccgttcgtcggcaaccctggacgtctgatcctgcccggcctcaagtgcactggcacagagtcattcctgggtgactgccccgtggacaagacgaccgcgacaccaacccaggagcccgccttcatcttctgccaagagcccacgttcgctgtacgactcgccggcggcgcgcacccgtctgagggccgtttggaggtgcactctcagtcagccacttgggagactgtgtgctgggcatcattcgacgcctcagctgtggacgtggtgtgccgacaggctggctttgagaccacgccgctcaacccgccttcctacatgaatttttccacctcgggcatccccgatgcgcgacccaactacggcatcacaaccattatgaactgcccgccaggagccagttccatcactcagtgcggcaacttcaccaatgactttgaaaggaaatggaccctcccgtccagctgcgccagccctggtctggatgtggtggtcaagtgctaccagcgcccaccgctgcgaacagatgtcgtctctcgctcattgtgtacggacccctggagcactcagtctcccatctctcccgaagctggagtaaccgccatgctggttggagagtttgatgaccaagttgtgggcgatcgctcgcaggatgtcctgctcctcaagtacggtgcggacggcaagctcatcggtcacgctgcattcggccgcccctgggggtccaccttctcagcagaggctgattacgacttcggcccgacgcccaagcccgacgtcctcctgcttgccgacatgaccgggagcggccgcgactcgttggtcgccgtcacgtccactcaggttaaggtggccattgccagcggctcgcgcggcttctcgccgctcaccacctggctggacctaactggctcgcccttctccatcgatgtcaccaacaccacaacccgctcctatgttttcacggacgtgacgggagaccgtgcctccgacatggtgtttttcgatcagcccaccttgcgcctagcgtacatgccaagcaaccggaacaacaagctggtggacgacaccgacggcgacggtaccacttggttcgagctctccacggtatggaccgccgggcggcagcagcacgtgtcgggacgctgcgcctcactcggcgaggactgcttcctgatcacatcagatgtcaacaacgacaagctgaacgacatcgcgctggtgtatctggaccgtgtgactgagacggaggagttctacctgaccctggtcaccacaagcccgcccgcacccctcaactggtacatgacctccgccgctgtgttccctcgcggcgcctgcacctcgccgcaagccgtggccctgggacagtttgtgggcctggacggctcgttggacggcaccattgccggcaccaaccagccgcagctgctgtgcctgtccagctacgaccagcgcatctacgtgggcgggctgggcgtgtggggttcgctgcccgggcctgtgacgtcgctgcatgtgcgggatgtggacgtggacggccgcgacgacctgctcatattcaccgaggtcggctcctactacctcgtgtccaccggtgcttccttcgggccggcgctgccgaccgccgcatggctcagcccctcgtctgtcagtctcgcggtgccgctaacgctcgacctgggtcagaccgaccagaccgcgtccagcgttgtagcctctgccgacgtcattggtgccgcacccgtggagcaccgctgcggcccgccgcgtcgcgtggttgcctattacaccaaccgccgccccgacaagtcgcccgcttgcctggcctcggtcgcggatgtagagaccactgcacttcagcgcgccgctgcagccacgcacgtcatcttcgcgcacgtcaagcccaacgccgagaccatcagcgtcgacctggccaacgagcgcgacgggcccgtgctcgccaacctggacggcaacctgttcaacgtgaaccccgacatccgcgtgctggtgtcggtgggcggacccggaggcctggactctgactactcccgcctggtcctgaacgagcagtcggtggtgggcttcgctaacgccaccgtcacgttcctcaacgcctacaacctggacggggccgagctcagctggcccaacttgcagtcggagcaggtcgagggctacacagccctgctcgagatcctgagcgccaccctgcgccctgccggcaagctgctgtctctcgcggtgccgccgcgcgaggtgtacgtgagcatggactggggccgcctgggcttgctggtcgacatgatcaacttccagggttttgacctggagggtgacgaggtgctgggcgcctcgccctacgtggagacccccctgtttgactgccaggaggcggagggcctgtccgtcaactcgctggtggacttgatcctggccgccggcgcgccaccgcaactgctgactgtggtggcgtcatccatgggccgctctttcgtgctggacggcgatggcttttcgccccccgcgcaacccgtcgcctcaggccccggcagccccggcccttgcatgggcgtggaggggctcctggaccagtccgagattaagctgctgctgccgcccggcgcggcccgccacgacccggaggccttcgcaaacgtgggccccttcgccgccaaccagtacgcgcactgggaggacgcctactccattgtgaacaaggtctgcttcgcccgctcgcactgcctgggcggcgtgggtctgtgggacgtggacggcgacagctacggcgagctgctgggcgctgtcggccgcgcggtgctgggcgacccggccatctgcaccgagtactcgccgcccgagtgcaccaacacggtgtccacccgcggcagtgaggatctgggctcgcccgaactggtggccacactgggcgactcagagttcctgttgtaccaggtccgcaagaactggcccgacgcccgtgaccattgccagcaaattggtggcgacctggtgtctgtgacgtcccgtggcgaggcgggtgtggtgtacagcctcatcaccgcgtgggccagcagcgggcagttgggacccgacgacatctacagcggccgtgacgtgtacgtttggctgggcggtagcgacgcggcccaggagggccgcttcgtgtgggcggaatccggcgccgacttcacgttcacatcctgggcgggcgggcagcccgacggccggtttggtggagaggactgcgttgcaaccaccgtgcggctggccggcagcagcggcgcgggcctgcgccaggtcatcagcagcgaggcgctgtggaacgacgtcggctgcactgcggcgctgccctttgtgtgccagcctctcgggtcgccagggctgctggcaggtggtgtcgggaactgcggcgacacggccctggcccgctctctgctgcgcgcggccaaggaggtgccatggctgtccgcgacctaccacgtgctggcgcccgcggaggagggcgaccccggcctgatgctcacgcagcccgaggccaacaagctgtgccgcagcctgggcggagagctgcccacgctgacggacccctgggtgcgcgaggacttgaccagccagtaccaccgcgacctgcccacgcacacctggctggggctgcgctcgtacggcgatggccagctgttctggaatgacggcactttcacgactgacggcatgctgaacgcctgggagcccggcgagttcggcgacgcggcctgcggtctgatcgtaggcccgagcggcgccaacgtaacagtctcggccggaacgctctacagcttctggaacgccaccaccttccagggcgccatccgggacctgacgatttacaatctcacagactacttcgcgccgcaagtgcagatgtacagcgtgtttctgcctcagggcgtgtactcgctcagctgcaacgagcgcatgcccaccacctgccagacgggcatgcccgcggtgtccttgacgcccaacttctactgcctcacgcgccccaacggccgcgcctatgtggtgcccggcaaggagctgcccagcatgcccctctacctcagcaccgagcgcgcctgcgccgccgcctgcatgctcaacttccggtgtgtgtattacacgtggctgccccgcttccgcgcgtccttcctccccaccgacgaggtcctgggccgccccaaccagctgcaggaccagggctcctgctacctgatgggccgcccctggatgcccaactccgaccgcctgcccaagctgctgtccgagatcaccgacagcgaccgggtgtgcttccgcagtggcagcatcttcagtggcgacaccctgcccatcagcgacgacacgctcatccagccccccgccgccgtcgggccccttttcggcaaccccgcggccgtggccgctaaccccgcagggacgccacctgccacgcccttttctctgctgtgcggtagcgacggcgccgctgcaccgctgcttagctccctcaccttcctcgtcgacaacggcacccgtggaatccaggacgtgggcgcagcatgcgccggcaccgtctccgcgggtgtgcttggctccgtttccgccgagggctacgagctgcgggtgcggcagttgcagcggcctgtcatccagtcgtacaccgcgcgctgcggccccggcggagtgacgggcatgttgggcagctacgacaaccgcggcatgtgccaggtgtctctgacgtgcgccagtggtgccgttgagccggtgctgcctcccacggccagccgcaactgcaccgccgcggcctccttctttgattacgagtgcccgcccggccagctcgcgattgggctgcagggcttgttcctcaacgctgccacttatacggcctccgacaacatactggccgcgattcggatgctgtgcgccgctgtgccggtcgcaatggcggcagctactggggccttctttcaggagctgatgcagtcccggcgcgtggaccttggcatcaacggcggtggcagcgccaggcgccggctgcaacagacctcgccgccgtcgcccacctgcgcccaagccgccgtcgcctgtgccgtttccgccccgtgcctccccgccattcccaccatcgccgcccccggttccttcaccgccgaatcctccgccgtcgccagcaccccagatccccacccctccatcaccaccgccaagacgtcatcctctgccgcgactgctcgcccctgtttgcgccatatcatcacgcagctacaaacgccgatcgtttcggcgggggctctgccgctgcagtctggcgccgtggcgaaccaaccactgacggggctgggcggcgtgtgcgcacctttagcatcggcaccgggtgcggtcgacaccgtcagcgcaggcctgccagcggtgccaacgttgcctcccatctctgggcagccctttaatgtgtcgattgtgggtggtgcggcatgccccaccggaattgtgcaagtgaccggcctgcacctctcattccgcattggccctcccgccaacccgtcgtacgtcaacaacctcgctgtcagatgccgtaccgtggccacgcctctgcccctgccgaccgcgcccgtgggttaccctagccaccggccattcagctacacgtgcccgccgagcaccgtgctgtcggagatcttttggaatactcaggagtggccagcttcgtcgccaggcaccgtccgcaaccagcccgtcccggtcatcaccagcctcgtcttcaagtgcaccccgtggacggtgccgacgcctgccgcccccatacccccgccatcgcccttcagccagattgaggcgaacagcatgaccagccttaccctggcatgccctcttggccagtttctcacttccgtttacggcaggttcgactcggcgcccgccaacatgggtggcgtggcctttgtgcgcagcctgagcatcacatgcagcggccccaccaccgtcacgcgcgaggtctcaaccatcatggccccgaccgccgccaccacgcccttcacgtccgcggtgtgccctggcggcattggcgcgctcacggctcgcacgctggccgtacctggagcccccaccaccacgcctccggcgctgctttcgcttgatgcgcattgctacgacacgcaactgcacacacgcaagctgagcttcctgccacccgcgctatcaaacgcagcaccacaagtggctgaccgtatctcggagctcacagaccgctgtctgggcctgaccctggtgtcgggtattacggtgttgcgatcaatgtttagcggcggcgtactcatcacatctggcgttcccacctcctccttcctgcacggcattaaagtcagctgcttcgacgtgccggagcctaatccaccggcgttggccgtgtcggcccaactgccgcccaaccagctgccagccgcacccgcggtcacgttcaagtacgaatgtccggccggctccaaggtcgtctcagtgctgtcgcgcgtggacgcagacgatgaccttctcaacgtccgcattgaatgcgacaacgcgccgcttggcgacgccgagtccctggcgtccatagcagcccgcctcacgccattctttgcgccgcctcagatcttcgttgccaactgcaccaactgcacaactgccgccaacgtcagctcgatgggctacggccagcgacgctacatcagccctgacattgccatctcagcgccccgcacgtcgtatgtcatcgagcgcacgtgccccctgggcatagccggcatcatcaacaccgctacctcgagccgcatcgtgccggagcttggcggcgctgccacgcccgtgtcgtccgctgccctgcccagcagcgtggtgactggcgccaccattgcgctgttcgacgtgctgttggactggggcaacgccgtcgctttctgcatggcccaagatggcgcgctcatgaccattgaggatgagttgcagcgcctggcggtcggctcagtggttcaggagtgggcggcggagaacaccggtgacgcggtactgggtgtctggattggcgcgcgccgcactggtaatggcctgtacgatttcacgtaccaagataacacccctatgggtggctacgtcgcgccctgggcgcctggcgagcccaacgatctgtcgggcgtggaggattgcgtggagctggtcgtcaacgtgaccagtgggcttgtaagctggaacgaccgcgtgtgcaccggcttagtgcgccggccactctgcaagctgctgcctaaggccacggtggagggtgcgaactcagctgacgtggcgccgccgaatgtgcaaatctctgctaccaacaatgacgagctcagcttctacaacgttagcctgacgtggtatgagggactcaacttctgccagcggcgtggcggcaacctcgccagcttccgcgaccaggacgagattaaacgattcagcgcagcgatcacggattggattggctacgctgaaccagggcggttcttataccagtacacaacgcttcccatagcgtggacgggtctgcgacgccaaatgccagctgcgggcacaccggccgaggcgctgcgctccgcatccgctgtgtttcagtatggcggccgagagttcctcttcattcccacgctggccactcctgatgaggctgacagcgcctgccagggcttcggaggcaatctagccaccctgtatacgctcgatgaatacaacgccgtcctcacggagttcctgcctgccatcattcgatacggcatcaactcgacagcttcggtggttgcaacccacatcggcctcatccgcacaaacttcagcagctacggctggcgtgatggcctgggttggaacggatacacgcccgtgggcgtgcctgtgaacatggcgtcactgtgcggcgtcatcaacactcgttgcgccgctggcaacacctcagtaagcttctcatcctgcagctggaacgtcagcaccaccagctgctcgttccaggccaacagcatctacccagctcgcaacccctacatctgcagccggctcactcccgcgacatcaagcatcgtctccggctaccggcagtatctggcctttgctgagcggcgcacatgggccggcgcggccgcgggctgcgcagccattggtgcccgcttggcgagtttccagctgccagaagactacagcgcgttcctggcagtcgccaacaggtctcaagttttcctagctgctacgggcatgaccacgtcgctcgccggctccgcccacattggcctgtcacacgatagcaccggcgcctacagctggtccgacgggcggcccctgctgtatggtgtgtgggctgcgggccagcctgatgccctggccgccaacaccacctgcggctccttcgcgctgtcttgcacaaactcctccggcgtctggatgaactgtgcaacgccgcagctacgggacgtggcatgtggcacccttgcgccctacgtttgcagctacgacttcgacgacgagtgggctttctcagatggaacgcctctgttgtacacacgcgccacgccagctgccctggggcagccggccgctatcatggccggcaattaccagtgggaccagtttaaccggacaggtcatcgccccgccctgccctcttgcatatggccttggctatgtgccagagggatgggcgtgcaatatggccgggtgttttcgccagctgtcgggcgacagactgacagatgggtgcgtcgcctgcggggcaggggtcgcgccggccgtgcgggcctaagcggccaagctagcgagctgcccattcgttctcatagctgtcatagtaagctccaacatgagcagaacgcgtcggtagtctcgctgggctgcacaggcgcaaccgcgagccgcgactacacgggcacacccttcctgactttctccaccaacgacaccgagaagtgctgcagcacctgcagcgccaccccgggatgcggctggttcacaattgtcaccaacaccagcacctgcaccctcaagcgagccaacggagtgcttgtggcctcagccaaccccaacatgcggtccggagcatccggccgtccccttgccagcctggccgatcctggcgcccttctgaaccctctgggcagccctgactgtgtcaccttgacctctggtttggatcagcggctcttgataggaagtggcgaaccaagcacagttggatcagtttaccgaatgccgaaccagcagtgtttgcagaagtttccagtggcatgtcgacgctcaaacgcgaaggaggcagtgcccgaaaccgagcgccgcagtttggcatcatacatccagcccgtcggcagggtttacaccagtaacggccagctggagctgtcactttacaagacatggcaggactctccatctgctcagaagttctgcgagctgcgcggtggcaccttagtggagccgacaacctatcagatccaagaggccgccttccgcttgggtttggatattctttaccgtggccagtcaacggtcttcgtcgactaccacattggcgcgtcggacaagcaacatgtcgccgaaccagacgtgggctcctaccttttgccggtttgcgggctcttatcccatgtgccaacgttcttcccgcgcctgatggattggtaccaagccaaggccttttgcgaggccaactcgggagacttggcttactttgacagcgcccagcagtatgaggaggtggcatcatccctacggcaatgggcacagacccgcccgttcgcatctggcagcatttccaggagccagtcctacgtcagcgtgtggttggggctcaacaatcgctttggttcgtggcggtggtctgcaagaccctacgttgatgtgaacccggtttgggccccttggaccggttacaacgccaccggtttcagggtacgcaaccgagcctacgatgccccggcgatgggtctcatgtcgcccggtatcgacacgccgttcaccatgtgccccaacgagacggatgcggagagtttcgttgtgggcttccgggcccaagtcgacacccggtctttgagtgggacgccaactagtgccagtaacttgctaggattgatgggactgcggatgcgatgccgctccaagtcatttgtcggcaccttcgagaacttgatgccggagcaggacatcagcagcattacaagtgtctccggcgttggtgcatggggcacatccgagaccctgtgcaacaattggaacaactcaggcttcggtaactgggtcgtcgggctccagttgcaagcagttccaaggagggatcgacccatcatgtcacaggtccgaaactgcattccgtctggcggcaacccatgcgcatcatacaccgtcagctggcaggcgaccagaacgacgtggggagatgatgtgggcattacgtccatccgtggtatctgcgcaaatcagcgtgcggacaacgccagctgggcccagatcgtcaacccggcgccggcgaccgacgcacagtggcttccgccaatcacctgcgagtcaggctttgctgtctgtggcataagcacacgcgtcgacttttccggtgccaatttcacgatcgccaatgccagcaacagtgcaagcgacgactctggagtttctggagtcacacttcgctgctgcccacttcgagatcaattcgcgctgtccactgaatgcgcggaagcttacgtgttcgggaacaacggcaccagcgcatggcagcagcggcagtgcgccacgcgtcgatcgctggtcagcataagcaacgtgctgtgccgccgcgagctgcccgatagcaacgccaacgcggcaatgattgtgacaaacacgtccgccaccacccgcgcggccgacaaggagctagcgtccatccccaccctcagctcccccctgctaccggcagtggctcagagcgtggagccgctgggggcagagcgtgtgctgaccaccataacgtcgcggcggggaaccacagaccaggtccagctgtatgaagtcctactctttgacatccccatgccctggcaaccggctgtatcgttctgccaggcgcacggcgcagagcttctggtcattgacgacgacagtaccgcagcggcggcgaaccgcctagtggcgcgtgttatgcctgcaactgccttccaatcttctaccacgttttcccttcaattctggtggggggcggagtcctgtggcgctcatcttctggtactgtgccgccgtcgtagtggcgacggcggcggcgttgcccgtgccacgccatctatgtctacggcacccgcggcttcgcttacgatccgagatgtgcgcaccacgttgtaccgcgagaccatgacctggagtcaggccgtggactactgccagcgtcgatccggcatccttgccagcatcaactccgccaacgaggccgacgtcatcgcggcgatggtacgtgagtgggcgcgaactacgactgctggagaggtcaaggtttggctgggcggctcatggagccaaagcgagaagatgtacaagtgggaggacgagatgccgtttgattacgttcgcggcggcggcttgctggcggcgccggaaggcccaacccagctctgcttgtcttggcggctgctgccggacgggacggacgtgtggcagacggacgagtgcgccgagtttgcgctggcgctctgccagtccgagctgcagcccttcatctgcaacaccggtgccaactcaacgcggcccgtggacgccaacccctatgacgccaaggcaaaggtttattgcccgccaggtacggttctcacgggcctttccggcagcatcgcaaactcaagcctgtcaggggcaagtctggcgctcgccgacggtatctcgttttctggcatctgtggcaaccctgcggcgcccgccatcctggcgaagcgcgacaatgaggagctgccgcagtgccgttatcgctggtcactgccccgcatcgaggggcccgaggtgaccatcaacacagccaactccacaaccgcactcgacagctgctttaagatgtgcgcagtgggcgatgccccgcttgcctacatctaccgcacgccactgcttgcggttctgtaccaaatcaatggcgtcttctcgtgccgctgcggccgggccctggtcggccgccagttgatcaacgatgatgcaatcaaggcggcggaggctaccggcgccgcaacctttctgtacggccgctcgtacgaagtgtatgccatctgcaccgtttcggaggagttcatgaccgccggttactttcagcagatcaccttcgctttgacattgcaagacattactgcgcagccgcccaagctgacctccttggtgcgcggctccaagtaccgtgtgttcagcggccagcgcactgattggaatgcggcccagcgcatctgcactctgcacggaggccatcttgcgacgctagagagcattggcgacatcgacgatctcaaccagttgttgcgcgctaaccttaacattaccgtcgagttccctcaaggcactggcatttggttgggattgtacgcggcacaaaccggatcataccgatggatcgatggtacacccttgcgctacccgctgggacccgtgcttgaggactggggctatgcaccgccgaattgcggatactttgacccgtggctcaattccaatcgcggcggccgactaatcaacgccgacgtgcgcgcgggatcatgtgataacgccaacgcctttgtttgcgagacaaacatcacgcccgggatccgggcctcctacactccttcgaccgcgactaggggcgccgcctgggaccttgtgcagttcaaggcgcaccgcgtctcttggcacgacgcctcacgcatttgccgctataataacatggacttgatgtggttcacggattaccttgaggagagcatcgtgctcagtacgggcacagcatggctcgctgccacgccggatgtgaccggccgcatatcctggcgcacccgcgcggagtccgctgctgccctgcgtgactcgcggtggaccctgcccctcaactggaacggcacagccgcacagctcctcgcccgaaccgattacacgcagctctgcggcatattcgacgcaactatttttgtgagccctaacccaagcacacgccaaagcccgttttcgctggcgcactgcaccaatgaggcgtaccccttcgtatgcaagagtaaagtcgagcgatggcgcggccttcccgctacaaacctcgtcacgccttcgccccctccacccccaacgccaccttcgccaccacctggcattggtaacgtgctcctgcgcattgagcgaccagcagccacgtttgtcgtgctagatcaggtcacttcccgggccgaggcgtcacgtatatgccgcgccaatggtggtaaactgcctgagtttacggatctgagcgagtatgacattgtcaccgaatctgtacgtcgctactcgaccggcaagacatcagaggcattctgggagttctggtttggtgcatcgagggactacttgactgtccccaacaccactgtctggcgctatgaatcaggcgaaatagcgtcacccaccgtatggggtcctgacgagccaaacaatgttggtgggaacgaaaactgcgtgcatatcttagtgtggctccaggacacgcccacggcgcagcgcagctcttccccaatccggaacgagcgcacctactggaatgatgttccatgcgatcgccggtcgaatgtggtgtgccagctaccaccgagagctccagggccgctgccgccccccaactcggacatcaatgcgatcgagtacgtcggcaccctgcgcggcatccgttacgtgatgtacagccaacagctgagctgggctcagtccaaggcgtactgcgaggcaaacggccagacgctggcggacttcgtgacctcggatgagctggatggtatggtccgcggaattttccactacgtctacacgctgtctgatttcaacgacgccgtgctcaaaacttggaccggatacaacagccgaagtgctgactacagaggaaacagcatcctcactgcaaacagctttgccgcgaagtccaccacgggctattacgcaccgacccagttggcgtctggttcctgctacggccttactctggatccgaagactcaggtgctgcagcgcctgttcgagccggtcgagtgcaccgaactcaggaggcccatctgccgttatgaccaggccctggcagcggctgcttatgagacgacgatcagcggccggcgcttcgcttatttcaaggaggagcgtacgtggggtcgcgcccgcgacgtatgcaggggcctgttccagggtgacattgctacattcaggactgatgcggaatgggcttccgtgaagacctggctaaacggcattttctggagcggacttgttgatactctgcaggtggacaacctgacccgacctctcaccggcactctacgcaacgctgcctggcttaacgccagcgagccaactgtcacctcggagtgtggttatgtggacattcgcgggacggtgcggccgtcagtggacagcttctggcgtgcctcgcggtgcaacatcacgcgccccttcctgtgcgcatactcaccgacgggggcgcctccacagaatcccgccacttatgttcccgcgaggtcgcaatttgagctggctacttcaattgccatgcgaattaaccgctacggctacacgtacacaatcatcacggatcccaagctcagaggcagttacgctgaggcccaatccatgtgcagcatgcttcccggcttccctggcggcatgttggcgaccttgttcagcgccgaggaccttgagtacttcagtcgtgtgggagcggtggccgagggagatgcgcccaacctgtgggtgggcttcggcgatctcctgagcccaggcttccccttctggatgagcagcaacgtggcgccgggcggcgacctgagcgagcaatggaggcgggacttcagccctgtcgcgactcttgaaccagtcacaaactccatggcgtgtggctaccttgacacatccagcgggcagctgcggcgcgacttctgcctcctacgcaagtatggcttcatctgcatgtcgccaggctcatacggcgaaacccagcatgttgccgtgacggagatgactggagatggcatgccagacgtggtagtcgcgacaaactgcccatgggataatggtgcaagtatcatcactttccagcagccggcccccgcctccttcagcaccgcggcggaccagctcattcgccccactctcacagcccgccactgcggcgacggtatccccctcatggccagggaggagtgtgacgagggcttcgacatcgaggaggtcatcacgtgggactttggttataacgcgacagtggccaagcctgctgcaacagccaaccgcaacggtcccggtgcgtgtgcgacgtcgtgcaagctgcagccgcgcttcgtggtgcaggccggcgcccgcgaggtgttcatcgccctgggctcgggcaacgacaccatcaagcacctcggcgtcaactacaacctgtacggccaggctcgcggcttccgcgagctggccgacccacctgactcgccgctggtgctggatggcttcaccaacatcactgccgataaccatgggtttgcatacgtgcacggcaagccccagcgccagttccctgccaacgaacccattgccatccacaagggtcgtgcactcatgcccgggactcctttccagttccgagcgttcatgcaaaccgacacctccaagcccgtgctgcccaactgggccaacgtcgaaactgccagcgtgtccgacccgtccttcatcaccgccacgtccacctgcggctgcacacccaccaaccccagcggccagccagtggacctgagcatcagacagcagggtggcgccgtggagttcagctgggtggtgggctcagcctgcgagagctccgtgtccatcacccgcagccttgtggatgaggtgaacaatgagctgctcaacaccaccacagtggcgcagctgtctatcggcctggcctgcggcacagcgtaccgcccctccaaggccgaggtggatgaagacatcgcgcgtgacaagctgcaggttggccggacgtaccgctactgcatcgtggtcacctctgccgccacgtccacctacttcctggacgcgaccaagccactggagcccatccgcttcgtaagcgagcccatttgccgtgacgtacgcattcagtggacctccaccatcaccggcgaggtccgcacgcgttacgacacgccggcccctggcgtacgcctgtcggcccgactaatcggcacaccctacgtggtgagcgccgtcacggacgacagcggccgctatgagctggtcatgcagacggatgtgtacaactgcgacccagtactggcgcccgaggagtgcctcaagcagcgcgtcagggcggtggccagtgcgcgcaccaagctgcgctcaggccgcatcctgctccatgacttcagcatcaatggccggccgggcgcagtgcagatgctggcactgcagcacttgcaggttcagcagagtgtgcgaatcttggatgaaagcgccatgcctatcaccggattcgtcaggtggccgggatcggaggcgaatcgcggctttgatcagacacgcggctgccccatcaccaacgcgcgcgtgtgcgctgtcactgcccgcgagaactcaagcgtcagttgcgcaatgagcgaccccgggacgggtgcgttcctgctggctgcgggcgttggctcgttcctgcggctggacgtcacgtacgagaaccacacatttgccatcaacatgctcggcaccgtcgatgttgatgacactggggcctttgagctcatggcgccaatctacgatgtcgatatccgcgacctgacccgccgcaccgtgcgcgtgggccttgtgggcgggcagtgtgaaatcaaactgggagccgccgtgctgcagttcagcgcctacgactgcgacctacagtcgggccagcgcgcgctggaccggcgtgtacgcttggacccgagcgtgccgtacacggacattgaggtaccagcattaccctgggacatatcctatgtgggcattgaggatgctgtgcccgacgtgagccccgaagcaatcgagcgattcctcaccatcaccaaccagatcacgggctttgtgaacctgacaattggtaccgacacggagctgttcgaccccactgctgcggacctcgacattggtgaagagcccgttctgcctgaaccgccagtcgtcaagttccagttcacagctcccaacgagatggaggtgcaggtgtgcaaggacttcaaaggctccctcatcaactgcggcgagttcagcctcaaccgccgttgcgacggcaacacctcgatcaacgcctaccaggctgtgtacagcgccttcgggccgcccgacacgtcattggtgaagaaggatgtgttgctgctgaagcgagctgcgcggtataagatgcgcatcaagctcttccagatgtacggcaggctccggtgcgacaacctgaagaccacagtgctggttcaggattccattggaggcgaggtggaggagaaccagtgcagcgtcaagcgccggggctgcgtgaagaatgttgggtttgatgagctgaccaacaccaccgagttcacctacgacctggtcccgggcgccattagctttgctgtcggcaccgcctacgcgctgccgctgtcggctgtggctgccagcccaggctggccttcgcgctccctgctattgtactccatcgtggagggcacccaatcccgcacgggcactggctacatcgagatccccatccccgtgcctctgctcatcttgcgcgacccgccgggcgaccgcagctatgccacgctggagggaagcatctccacagccgtcaagctgtcacaagtgacgcacgacaaacagacctgcggcggcgtgggcgatgatgaggtcttcagcaaggccatgccttgggtaaacttgctgaacgcggttcctttctccaagtttggtaaaacctccaagatcaacgaaggggtgatgaaggcaaccaaaagcgccgccaaggtcgcgaccgcacaggataagattaggagaggtgtcccgaagaccagtctgtggggccaggtgaaacggtttggcagcaagggggcagctgcacccgggaaggcggtgaaaggtgtggtgaagaaagtgaagtcatggacgggctctgggacgaagaaatcggatattgtcattggcggccaacgcaagggcgccgtgccagtcaagcagcaggagtgggtgagggcaacggctaaccgtggcgcaacaacggcaacgcaaacatcatccgcggcccaaaaaggcacccagctcccttcgtccctgaccaaggcggtgagcacagcgaagaaggttgttgacaaggtcgacgacagtctggagcaaatggctttgttctaccagaagtacttccaggagaacgccatcaagaagttctacgacgattaccacatcagcaagtacatcaaggtcctgaagcgcctgtacaagagcgatgctctcacgcctgaggacaccacgggcgagcagctgcaagaccctgatggacttgagatgggccgcggcgcgggtttgtcgtaccgcaagaccgaaaacggtggccagctggcattcgagctgtttgagggccttggagtgccgactgaccccgacacgctggctgccgtcattgctgaaatgaagaccctgggtgaagacgagagcgccgagctgcttgctgggctggtggagcagcgggactatgcgcgggatgccgttgaggaggaccccatgctgccaagtgtcaacctcattgacatgaacgtggccttcaaccgcgacccctacggcctgcgccctggctacaagcacctcggcaaggagacgtccaggatccccgacatctaccgtccccaggacaaggccgagttcaggttgcggtccggcggcttcagtggcctgaaccccatctgcgccaagcggcacattggtgtcgggtatgatctggacatcctctcgtgcgcgggcttgggttacatggtgtgcctgccatccatccgtgatcgaggccaggctggcatgcttactgatatggcctggtacaacgaagaggaggaggagtcgtactacaagctgaccatcaagcgcgaggagggtttcagcacgcctgaggagtccaccccagagctcaccgacggtggcggcgacatgattctggcgcccacgttcgccattatgttcatcctgcaggatgagctgaagttcgacacccgcacgtgcacaccaacggcacgcatgggcattcccggctgggacctgcaggagaacatgcatggcactgcctggcactctgtgcaccacatccgcaacgtagtcatccccgagctctcgagcaagtacgccgccgagatgtccaagccggccgctcagcagagccccgacatcctcgccaacatctaccagggcatgcgtggttgggaggatgtcatgacaatctacgatgagatgaacaccatggcaaagcagcaggaggagagctttcccaactacgtggtgggagaccaggagatcaacggaatggtgcagggcaccgtggaaggcgtgtggcaggcgacgctggacgaccaccccgacaggcacatggatgcctttgaggcccgctccattgacccagagcggctggagcaatcaccagtgtggaagctgggatactatgaaggcagtgagaagctcgcgcagctcatgctgcgtactcaggcgtacatggataacagcacttcggccggcaacatcgtggcgatgccccgcgccaaggcggccatgggcggcgtcgccaccggaaaacatgttgacatcctgcaagagaagtacggggtccagttcaacaccatgtccttcagcggtggtggcggcagctacagctaccgctttaagaccatgagcactatcagcaccaagatccagttccagatcagcttcaaggacatgtttggctggaagggcggcggaggcggtggtgttgggttctggattgagaccacggatgagaacctttacggtttcgagctcgagttcgactccagcctgctggaggagacggaccgcgagcgcaccgtgagcttcacgctcaaggacaaggacgtgggcgactccttcctggtcaaagtcaaacccgacatggcgtacggcacacccatgttcgagctgcttgcgggccgcagcaagtgcccatacgagcacggcacgctgcagcgtgaaggcgcggcggtgtctgtgctgggcggccagaatgtacagttcaacgtgaagcagggcacagaggcgctgtacgagctgctgattgagaaccagtccggcacagacgagcaggtggagctgcaactgggccccgacctggccaccaacaaccaatccatgtacgtccagctgatgggggcgccgtggatcgagcccgtggggttcagcctgcgcggccccttcgccgcacaaacgcgcgccctggtgtcagccaaatgcggcccgcgctacccctccgccagcatcgacatcgtcgccaagtccacctgtgacagctccgagctgtcgcgtacgcccctcacgctgcaatgcttcaccccctgccccgctgtcatgtggccgcaagagtggccgcagcagcagcccctcatctacaacctcagcgacattacagcaagcaagaccatccggctcaaggtcttcaaccccgcatactccatccagaaatggaacacccacccgcgcctcaacggcaccaacggcaccacttcgatcatcatcgagtacaccaacgtggtctcgggcggcggcatctggctgccggtgcgctacctcaacggcagccgggtggacttcagcaagatcgaggaccccgcctacggctacgccacctttgactggtcgccggcctctgtggtggacggcgagtacctgctgcgctacgtggcgtactgcgacatcctggtgggcggcggcaccgacagccgctacgagggcccctccatctccctgctggtggacaaggcgccgcccgtgcccagccgcttctcggcctggcccaacatgtcgtacgtgccgggagaccaactgttcgtggacttcactgagccgttggactgccgcaagcccttcgccttcggcgtggtggccacccagcgcgactcggcaggcagcaccttcatcatccccagcaccgacctgtacgccacgtgctcgggcaaccgcatcaacttccactgggactccatcaaccgccccacggcgctcatgcccaaccgcaccgtcaccatccagctgctcaacgtcaaggacctggcgggcaatgccgtgccgcgcgccatcaacctcaccttcgccaccggcacgctcaccgcaaacgcgcccgtgacgctcaactatgtactggggccgctgcccacgccggcgcgccgcctgctgttcgccgaccgctcgggggtgctgccggtgcagctggtcaaccgcctggcgctgcgggacgagtccgcggcggagagcctggaggcccttgtggagcagcgcatggaggcgcggcggcagctgctggcccgcgtggacggcgtgctgcagagctgcaccgccagcggcgaggcgctggcggcggtggcggccatgaccagcgcgcgcgggcggctgcaggccactgacctgctggaggatgaggacctgctgagcatgctggtggcggcagcgcgcgacaacagctcgtgcctgtccacccagctggcagccaacttcgcgcagctccgccgcgtctttgccgagaagggcatcgacgaccagctgcttgagggcgcgggtgaggaggagctccgcgcggtgcgggcggcggcaacggcgagggcggcgcgtatgggcctggcgcaagcgtgggaggcgtccgtggcagaggcgcagcgggagcaggcgaagctgctggcggcgagtgagcaggcgacgacggaggcgcaggagctgctggcgcacatgacagcagtctcggaggcagacggcgtccacccctacatcagcctggctgtctgcgtgctggtgagcaacgccgtggcgctgctgctggtgggcggcatctggcgctacaggaagcgcaacagcggcctgtcagaactcaattccaagaagcgcggcacaggtctgctgccgactcggcgccgccgcggcctggcggcgatcctgcggccgggtgctgcgagcagcggcagcaccggcgacggcggcagcagtgctggcgaccagcaccaggcgt

SEQ ID NO: 232 - DNA, 2382 bp, Chlamydomonas reinhardtii
atgggctcgtgcctctccgcctccgccgaggagggccacagtgctaagccgaagcaacgggataagcaacttacggtcaaagtgaagcgcccggactggcggcagcacccacttgcaaagcagttcaacctcatcaagcgtcttggcagaggcggctacagcgaggtgtggcacgcggtgcacaaggggacgggcgagacgcgggcgctcaaggtggtggcgctggatgacccggagctgctgcccggagacttggccattctgcgggctgaggccaagttcctgctgacgctggattgcccctacctcatcaagtgctatgagaccacacacgacggcgtccatctcttcctagtgctggaaatgctcacgggcggcgagctgcttgaccacatacacaaggtgcacaactacacggagcggcaggctgccaacctgttcgcgcaggtggtgtctgccatctcctacctgcacaacctcaacctgatgcaccgcgacatcaagcccgagaacgtcatgttcacggcgccagttaacgactgcgaggcggcgggggcgcccctgcgcgtcaaggtcatcgacctgggcatgtcggcgcaattcgaccccaaaaagcttgtacgggaggccaccggcacgcctggttttgccgcgcctgagctgttcaatggaggggcgcaaacgcccgcgtgcgacgtgtacagcctaggcgtagtgttgttcatcatgctgattggccggccgccgcactcgggcacagacatccgctacctgacctactctgacaagagcatcaaggacgctcccgggctccaggacgcgaggtaccgtgcgctgtcggccgacgccaaggacctgttgctgaagatgttggcggatgaccccaaggcccggccgacatgtctggaggtgttgaagcaccccttcatgacggcggatgaatccaacacggcagcgcaccgcgagattggggatgtggtgcggcgccgcatgagcgacctagcgcagctgaggcgcctgcacggcctgcgctatgctatgcacatgtcacgccccaccaccgaggccgacaagcgcgcgctagtagccaccatggcccagcggcagcatcgcctgggcgtgggcggcagcggcagcggcgacaacacgccgcgcggcggcgccggtgtcggcgccgacgacgccgcgcccgtgtgcgaccgcaacgcctaccgcagcgtcatctggaagagcttcctggcgcccatgaactccctgcgtggcctcagcggcacgcgcaagcaccccggcacgcccggcgccggctgcagcggcaacggcgccgcggccaggagcgccctcgtggcggcctcacccggcggggccatgttgcgggctgacctggtgcaagacgacggaggcgacgacgacgtggccgacggctgcgctggcctggtggacacggacggtgccggcggcggcttggatgcgatggcgtccgggccggatgtgatgtcggaccggccctgggcgggcgaccggcacagccggcagcggcggcacagcagcacgggcgcggggctggtgacgacccacatcgcagatatcatgctggcggtgcggaccagcagcgtggccaacatgcatgccgcgcgcaccagcgcgacgccgctcagcgccgcacaggcagcgcgcgctcagctggccgcactctcatcgaaatcgaagctgcaggcggcattggaaagctcggccagcggcccggacgcggcatcgggagatgtgccagctcagctagggacgctggcaatgcggggcggcggcatggatacgccgcggggcggcggcactggccgcacgtccacttccggtcttgcggggtcgggcccctggccggtgtctggcgccggcgccggcgccggcgccgcggcccctgctcccgcgccgtgccttgacaagatggcgcttgtcaacgcgctgcccgcgttgtcgcactgcgcaaccatgccagcagccatcatgcgcgactgcgagcgggagtgggatgcgggagcgtgcgccgcgacggccgccggggccaaggcgggcagggctggcaacggcggcagcgcgggcacgggcaacagcgatggagatgcgacgggcgctacttcggcggccccggcccggtcgcccacgtcaagtgatgtggcggagacgctcacggcgctgcaggaggcgctggtgcccaggtcgtggtccgccaacccagccatgtacgaggcgctgttagccatggacgcgatcatggagggcctcaatggaaacgcaagcgccctggtgtcccctcgcgcggcggcggctgcggcggctgcggttgcagcgcacgcgccgccagtgaagcagaccacaaccgctgcgtga

SEQ ID NO: 233 - DNA, 1113 bp, Chlamydomonas reinhardtii
atgcttcgcggctttcgccacacagggcgttcattggttaggagtgggcgagaagcgcccgtagcctgcccccttagggctatacgcagccaggggtcgcggcgacccgcgctgaatggtgccgcgcctttgccaccttcttcctcgcgcccgctgtccacacctcctcagtacgctcctagctacgttggtgtggtggaaaaggtggtcgaagccgaggagctgctcccactgccggcccaggagtcacctgccgatgacccttcgttggccaacccgctccagcggatggagcggttatcaaccggatggttcggtgtcatcatggagtttgagggcgtcgtggtggagacttcggaggagacacaccggcaagcgtggcttcaggttgctgacgagttccgctttcgcaagccgctcggtcagagccttcgccggataaagggcgtgcgcgacgaggttgtggtgtcccgcatcttcggctggacgcacaaccctagcgttgcccggcaagttgcgcagcggaaagctgagctgtatgagaccctcatgggcggacgtcagctcgcagccatgctggagacgcggccgtttctggagacgctgaagcggtacagcatccccgttgctctggcaacgccgctcagcgagtccaaagtgaaggatggcctgcagcggcacaaccttgcacaatacttcgacgcggtggtgacggcggaggacagcggctcagcggaggtggagttctactacgcctacgcagcaagcaagatccagcgcccacccatccgctgcgtcgtcgtgggggagtccaataccagcgttgaggcggcgcacgagctgggcatgaagtgcgtggtcgtgacaggcacgaaccccgtgttcgacttcacgggtgcagacctggtggtgcgcaacctgtcgcaactgtcattcatgaacatgaagcgcctgtttgcggaggagagccttgtggagtccaagctgaacccgctggaggagccagggcgcaaccaggcggacgacattgatgatgaggacgattacgcggatgacgacgatgaggggttccagcccatgcgcggagcgatggcgtttggtgggcggtggtaa

SEQ ID NO: 234 - DNA, 9873 bp, Chlamydomonas reinhardtii
atgccagcgtccaacggcgcggaccagggcactgcccccgggggcacgatggcgtatggcgttctgtcacgggagcagcgaaagcaaatgtttgggcttgactgcccggagcagctggagtggcggcactggaacccagggacggagtatgtgaagcagctggtgctgaagaacgtgagcacgtccgtgcttaagattcgcttcaagcagcccaccagcaaagccttcggcatggacttcccggagcccttcaagctgcggccaggcatgagccagccgctcaaggtggtgttccggccgctcaagcagcagcactacagcgacaatgtggagctgttcgtggggaacgtgtcctgcctggtgcccgtgcacgcctacacgcctgtgactcacatcgaggtgccgccggcgctggactttggcttcacgcctacaaaggagacggtgacggcgcagctgcccgtccgcaacacaggagacgtgcgggttgacgtgctgtggaagctggacgcgccgttctccatctcgccgctgttcgccagcctggcgcctggcgaggtggtggccttcaccgcctcctttacgcccccggaggcctgctcctacacagccagcgcggcctgccagctggagtcgggcgcagcggccatctgcaagatctccggcatcggcaagtttccgtacctgtcggtggagcaggcgggcgtggacttcggggcggtagtggtggggcagcgtgtggagcggctggtgcggttcggcaaccacagcgtggtgcccgcgcacttcgcggtcacgcacgacgaggcggggcccgacgacggcgtgttcaccgtggggccagccaggggcacgctgggcccggaggagtacagcatgctcaagctgtcctacacgccccgcgccaccggcacattcagcagcgagaccttccacatcggcaccgccggcggcaaccgcgtggcgctcaacctgcgcggcaccgcggtggcgccgctcgtgacgctctccacgcgcgccttcaactttggcaacgtggccgccggcgccaccgcctcgcgcgtgctgtacatccgcaaccactccgccgtgcccgtgccgtacgacttccaggtcgacccgctggacgtgttcgccatctcccgcacacgcggcgtgctggcccccgacagcaccgcgcacgtgaccatcacgttccggcccatggccggcctggccgccaacctgtggcgccgcgtgacgctgctgctcaaggacgccgagccgcagggtgtggacctggtggccaccgcctacaccgacaagagccggccgccgccgctgagccagcgccacgtggagcgctacatggcgcgcgtgctgtcgggcggcccggccgtggaggagtcacagctggactccaagccgccctccgcggccacgggcgccggcgggctggatggcgccagcgagggcggcgcagggccgctgttggcgggcggtggttttggcagcctgttgccgccgctgggtgacgcggcggagggcggggagggcgccgcgtccaagctgcttggccccgacggctggtcgctgctgttcggcggccaggacccggctgcggcgctgacggtggacagcgacgcgctggactttggcagctgctcgcgcctgagcgcatccgagtaccgctccgtgaccgtcaccaaccacacccccgccaagctgacggccttcgtgctggtgcccgaatgggccgacccgggcgcggcgcccggcgacgcgccgcagcgcgtgttccaggtgttccccgagtccgccgacatgcggccctacggccaggccacgttcaaggtggcgttccggccgccgcgcgacgccgcgttcttcagccagcagctggcgctggtggcgcacaccaagagccagcgcaacttccgactggtggcggagcaccaggtgctgccggcctggtgcgtgccgctgcgcgccaccggcaacaccttcctgcactccaaccccgagttcgggcccaaggtggagctgtccagccgggccgtggccttcccgccctgccgccccggcgagcgcgtgcaccagacgctgctcatcgccaacagcggcgacacgcccgtcgccttctcctttggcgccgcgggcgccgcgctgggcccgctgttctccgccaagccggcggcgggcgtggtgccgccgcagggccacgtgctggtggcgctgcgcttcgcgcccaccgacacgcggcccgccgccgccaacgcgctggtcaccttcaacggcgtggcgtcgaacgcggtgtcggtgtcgctgcgcggcgcggcgcacacgccgcgcctgaccaccgacctgccctcctccacgctctacttccggcccacttgcgtgggcgcctccagccagcgcgccgtgacgctgcacaaccccagccgcgtgcccgtggccttccgctggcgcctgccggcgcggctgcagggcctggtaacggtctcgcccgccgccggcgcgctgcgcggtaacgagtcagtgcagctgcagtggtccttcacgccggcggcgcagaagctgtacgaggcgcgcgcggcctgcctggttatgtcgccaccggaagcggcgaatggcaatgcagccggcgccaccgcctccgccgccagcctgtttcccggcgccgggctggcgacggggatcgagtggtacgagggcgcgggcgcgacggcggcgctggcgggcatgggcgaggaggaggcggcggacgcagtgctgctgagcctggtgggtgagggcacgcagggcgcggtggcgctggaaccgccgtcgctggagctgggcgacctgcgggtggggcacccggtgcggcggccgctgctgctgcagaactgcagcgacggcgtgttacgctacagcctggaggttggcccggcagaggacgaccagccgccggcgggcgacgccacgctcgtggacttcacggcggggctggacagtgcggcggagggcggcgtgggtggaggcgcgggcggcgcgggtggcgcggcgctggagtgctgggtggacgagcccgagggcgcgctgccggcgcgcgcgtccaaaacggtgatggtgacgctgttcccgcgctaccgcaagcgctacagcctgcaggtgcgctgccgcagcagcacagtggcgccgctgctcactgggcccaaccgcccgccgtcaggcggcgccggcccgcgccctctggacgccggcagcgaagctgccgcggcggcggccgccgccgccgcggccgcggctgcgccgctgcctccgccggtcattgcgccgctgactgccagcaccaccttccccacgctggaggtgacggacgtgtactgcgaggggctgccgaagcagctgctgtggcagctgctgggcctcaacgacctcaaccaccacctgcgcaccgaggtcaccgccacggagctgcgcctgcgggccgcgcaggaccgcggagcgctcaccaccgaggccgccagcgccgccatgcgccccttcctcatggagttcggcacgcacggcctgggcggccggccgcgtgtggtgcacgtagagatctccaaccccacgccgctgcccgcctcctggcagctgcactccttcgacgaccccgatggtgtggagctggagaactgggtggagcccggccgcccgcgcaccgagggcgagcgcatgcgcgacctcatcgccgagtacaagctgtttgagatgcggccgcgcagcggcgagctagagccgggcgcgcgctgcaccgtgaccatcgagttccggccctccgtggagggctccttcgagctgcccgtgtttctgcatatcacggatggcaagcggctgcggctgcagctgcaggccgtaaccacgcccgagccgctgcagctgctggcgctgccgccgccgctgcggacgttccggctggagcccgtggcgctgggcgagcgcgcgccgccgctgcagatgtacgtgctgcgcaacggcggcccggcgccgctgcactggcggctggacacggcgccgctggcggcgctggcggaggcgagctgggggcacccggtgctggagctggtggggccggaggagggcgacatcgaggagggcggcgtggcggccatcaactggcgcttctcgccgctggaggccaaggagtaccgggtcgaggtgccggtgctgctgggtgacggcggcattgaggtcatcgagctgctgggccgcggcttcgcgccgccgcccgcgccgccgcacggcgccgccgccgtgcagctcattggccccggcgccgccacctcgcccgcagcccccaccaccgccgccgaagacgacgacacgcccgcagcagcgctggattcggtgggcggcgacgcggaggcagaggcggcacgcgcggccgcggcggcggaccgggactggatcacttggcgcgggctgagctcggcacccagtgcgggcatggcggggcggctggcgctggtggaccacgacctggtgtcgctgggcgtcacccctgtgcgaggcctgacgcggcgcatcatcgtgctcaccaacaagtcgcgctacccgctggccttcgactgggacctgggctgcttggcgccgccgccgccgcccggcctggccgccacgcagcgcgccgccgcagccagcgccatgatggggctgggcggcggctcgctgctgcccgcctcacagctgcagctgctggcgggccggccgctgcagggcgccctggccatcagcccggccgccggcagcctggagccgggcgagcggctggtgtgccgcgtgtcgctgcacgccggcgtcacgccgcaggtgttcgagggcgaggtgcgctgccacgtgcgcatcgacgatgatgcggtggcggaggccgaggcggcggcggcggcagccgctgccgcaggcgccgccgccgtcgcggcggagctgccgttcgtggagcaggtggaggaggtgattgcggaggcgccggtgcgcgggccgccggcgccgccgccggctgtggcggcggcgcagcgcgccagccgcctgcgcagtcggctgccggtgcaccagtacatgacgacggcggtgcgcacgcgcatcgagccgctgaacgccgccttcaccgccaccatggaggcgcgcacgaggcggctggcggacgccacgcggccgccctcctggccggagccgcagtccatcagcgtgacgctgcgcggccgcatcctggacgagcggcagctcggcgcgctgcggtacgtgccgccgcacgagcgcgccgcggcgcgcgcggcggtggtggcgggcgcggcctgggtgccgccggccatggtgcccttctgggaggaggaggggcggtccacgcccgcggtgtctgcgcaacccagctcccagggcggtggtggctatggtgttggcggatatggtggcggctacggcagtggtggaagccagggcggggaggcgtcggtggcgccgtctggcggcgacccgggcggctactcgccgcgtggcggcatggcggattcgtggccgagcctggagccgggcctgggcatggaggagactgtggtggggccgccaacggtaggcctggacctcagcctcagcctgcagcacgccggaggggctggtggggcgccaggcggcgacggcgactccgactcccgacctggcacgccgtccatgacagcggcggcgcaccaccaccaccaccacccgcgccacgccggacccgctcccggctccggcacggctgaggtcatggaggtgaccttctccggcgaccagcagccgacaggcggcccgatgccatcgccaccgagcatcagcggcgcaccggacccagactccgccacgcctgacgacgacttcgccactagcgacgccgccgtcaatgccgcggcagcggtccgcgcggccggcggcggcatgggctcgccacagcctgtagaccccggcggctctgccgccgccgccgccagcgagctggcaccgccggcgctgccgccagcgccgccacgcggtggcgacatcgagtacgacgccctggtgtcggcccgtgaggtgctggcgggcttgtttgcagagctgatggaagacgcggacgtcgtgcgggccgtggcgttcctgccagagcacgaggtgcccagctttgctgaggtgcgggccacgccgccgccctgttacgaccccgcggtccgggcggctgcggaagcggcgcgggcagaggcagaggcgcgcgctgcggctgaggcggccaccaaggccgcggctgaggctgaggcggtggccgcccgcgcagcggcaatgttgggccccaagcatgaggccagcagcagtagcagcagtagcagcagcagcagcagcagttcctcttcctcatcttcttcctcgtcagcagcatcctcgccaggggcgtcgccaactggaaaggctcctgtcgtggaggcagccacgccgcgtctggtctccgcagtgggcggcatggcgccttcgcaaccagcgctggcgttgaggccggcgccgtccactccgccgcggacaccgccgaagccttcgcagggcgcggcattcgccataccggcggcagcggcgcaggcggcgacggagccgccggcgctcgaggacgagctggctgcggacaccgaactggcgcgagtgctggtggcgccggagtggcgtgcgtttgcggactttgtgctggagagtgcggtgctggggttgatgcaggagagcgcggcgggcgactgggagatgccggaggaggaggtgggccgcaccagcacccgcaccggcacctccggcacccgcaacccgaccagcaccgaaaccggcaccggaaccggcatcggcaccggcaccggcacctccggcacccgcaacccgaccagcaccggcaccggcaccagcaccggcaccggcaccggcaccggcaccggcaccggcaccggcaccggcaccggcacgaccttggggctggggaactcggccccggcgcacgaggatgaggaggagctggtgtttcggctgcagccgccgttccgggagcgcaccgactgtgccgctgccaaggagcggagcagggaggtggcaaagcacctggtcgcggaatttccgggcaacaaggccgagattgagatgcgggtgacacggagctgggaggagcgcagcgccttccccttcgcgggtctgtgggcgcgcgccaaggcggccggaggttccagcagtggaggcggaggcagatgcggaggcggcggaggcggtggcggcgcgggcaagggcgagcagctgctgtgtgcggcgctgctgcgcctgcacctggacgcgagggacagcaagaagagccttgtgcaggtgctctacatgtccaccatcccaaggcggcagcggcagggcctgggacgcctcctcacccggtgcctgcagcaggcggcgcacgaggcggggcagcagcacatgacggtggtgctggccggtccggacgtgcggcccttctggacaaagctggggttcgcggcgccggcccgtagctcacccgaggagctcgtgtgcagccagagcgccgcgagtgcggcggggcagaccaaggaggtttggctcgcgcacctgtcggcgctgcaacctgcagagctggggacagggaaagtgctgcgacaacagcccgggctgcggctgcggcgcgtggtgacggagctgggcggcaaggcagtggtggaggaacctgctggcagtagggggggaagcggagagggcagcggggagggcagcggagagggcagcggggagggcagcggggagggcagcggggaggacagcgtgcaggcggatgccgagcgggacgctgaggggcagcagcaagaggaagagggagaggaagaggacaaagagcaggagcaggaggaggagcgggaggaggagcggggggaggagcgggaggaggagcaggagcaggagcaaggcccgggcgaggaggtggaaacgcgcggccagggcgccgggccgtccagtgcggggcggaccagcggcaccgcgcggcagaaacgagaagcggcccgggctgcggctaagcgctcgggccggtcgcggaaacaggcgcgtgttgaagagcagggccagggcgagggaagtcagcccgcagtggagacggaggcgacagcggtgacaaacagccagcaggggcagtcacccgcagcccctcagcccaagagggcccggcgcagccagcctaagaaggaggtggcactcaagggcgccaagcctacgactccaaaccaacgtgcgtgggccctcatcttcacacacgttgccggcacgctgggtccccgtaatggcctgtacggacctggcatgttggtggaggagattgtgcgtggcggcctggcctgtcgcgacatgttcattgcgtctcgggcggggctggacgcgctggcggagggggtggaggccaagcagcatgcgtgcctgggcacgtacccaatgccgtcgctggattcctgggagacagcggagatggccatggttgggctggcgcgggacgctgacgcgtacctcaacatggactggcaactctgggaccgagtgctcggcaagccgctgaactgccacctctgggagctacggagagccatccgcttcctcaacctcgactggaaagcgggatgcttcttcgtgccggacatgtgcgaggacaagtccgagctggcagcggcgctgcacaagcacttccgtctgcccgagggcggcgtctgccccgtgcaggcgcggctgtgggtggcactgaggcaggagcggggtgccagccctttgaggtggccaggcggctcaggcgagctgttcggcgctctagaggccctggcgaaccgggccaaggacccgcgcgctgagcgggcctggcgccaggaggacgtccggagctgccgccggctggtggtcgcggagtttgggtgcgcggccgctgtcatggacgcgcaccgagtgctgcttgctcgtgaggaggagcagcaggagcagcctcctcagccgcaggcccaacaacccgcggaccagccgccgccaccgcagcagcgacagcagcagccgcagcaccagcaccagcagcagcagcaggtgcgcctgcagctggaagagcagcaacgtcgggaggcaggggaggcagaggatgcgcgctggaagagcgaggaggcgcgccgcaagacagaggacacgaagcggcagctggaggacaagcagcgcagcaaggaggacgcccgccggcagagtgaggacaacaggcgccgcaacgaggaccgccgcaggcagcaggaggatgagcggcggcggcaggaggacgaccggcgcgcgcaggctttggcgcggcgtgaccgggaggcgcaggcgcaggcgcaggcgcaggcgcaggcgcaggcgcaggcgcaggcgcaggcgcaggcgcaggcgcaggcgcaggcgcaggcgcaggcgcaggcgcaggcgcaggcgcaggcgcaggcgcaggcgcaggcgcaggcacaggcgcaggcgcagacgcaggcgcaggcgcagacgcaggcgcaggcgcaggcgcagacgcagacgcagacgcagacacaaacgctgccgcagccgcagccgcagccgcagcggaatctgctacccttgcctgatcccagggacgcgccggcagcattgcgcgcagcggtgcagggctatgaggagcggcgactggacttcctggcctacaagatggagcgacacgacggcggcggcaagcagcgacttctcgaacgcttgcactgtgcctgcggcggctggccacatccttcatgctggctggtgctgtgctccacctgctgcaaggcgctgcccaagcaggcgggctgctgccccgccggggcgcactag

SEQ ID NO: 235 - DNA, 127 bp, Artificial Sequence
  amiRNA cloning fragment
gatctgagatcttggccggtcttcttcgaataatctcgctgatcggcaccatgggggtggtggtgatcagcgctattatacgaagaagaccggccaagatcttcgtgccgcccggctgcggaggtgg

SEQ ID NO: 236 - DNA, 127 bp, Artificial Sequence
  amiRNA cloning fragment
gatctgagatctttggtaagcatggaggtaaaatctcgctgatcggcaccatgggggtggtggtgatcagcgctatttttcctccatgcttaccaaagatcttcgtgccgcccggctgcggaggtgg

SEQ ID NO: 237 - DNA, 127 bp, Artificial Sequence
  amiRNA cloning fragment
gatctgagatctaaggacagttggatcactttatctcgctgatcggcaccatgggggtggtggtgatcagcgctataaactgatccaactgtccttagatcttcgtgccgcccggctgcggaggtgg

SEQ ID NO: 238 - DNA, 127 bp, Artificial Sequence
  amiRNA cloning fragment
gatctgagatctcagtctctcgaagtcactttatctcgctgatcggcaccatgggggtggtggtgatcagcgctataaactgacttcgagagactgagatcttcgtgccgcccggctgcggaggtgg

SEQ ID NO: 239 - DNA, 127 bp, Artificial Sequence
  amiRNA cloning fragment
gatctgagatctttggcggaaagttcttgcaaatctcgctgatcggcaccatgggggtggtggtgatcagcgctatttgtgagaactttccgccaaagatcttcgtgccgcccggctgcggaggtgg

SEQ ID NO: 240 - DNA, 127 bp, Artificial Sequence
  amiRNA cloning fragment
gatctgagatctgcgtagtacattctgtagatatctcgctgatcggcaccatgggggtggtggtgatcagcgctatatcaacagaatgtactacgcagatcttcgtgccgcccggctgcggaggtgg

SEQ ID NO: 241 - DNA, 36 bp, Artificial Sequence
  PCR primer
  misc_feature (21)..(30): N is A, C, T or G
taatacgactcactatagggnnnnnnnnnnaccggt

SEQ ID NO: 242 - DNA, 36 bp, Artificial Sequence
  PCR primer
  misc_feature (21)..(30): N is A, C, T or G
taatacgactcactatagggnnnnnnnnnnggtacc

SEQ ID NO: 243 - DNA, 34 bp, Artificial Sequence; identical to SEQ ID NO: 88
  PCR primer

SEQ ID NO: 244 - DNA, 28 bp, Artificial Sequence
  PCR primer
agatctcagctggaacactgcgcccagg

SEQ ID NO: 245 - DNA, 42 bp, Artificial Sequence; identical to SEQ ID NO: 91
  PCR primer

SEQ ID NO: 246 - DNA, 33 bp, Artificial Sequence; identical to SEQ ID NO: 89
  PCR primer
